(19) United States
(12) Patent Application Publication
(10) Pub. No.: US 2012/0225076 A1
(43) Pub. Date: Sep. 6, 2012

(54) FRA-1 TARGET GENES AS DRUG TARGETS FOR TREATING CANCER

(75) Inventors: Daniel Simon Peeper, Amstelveen (NL); Christophe Jean Claude Desmet, Liege (BE); Fabien Reyal, Paris (FR)

(73) Assignee: Stichting Het Nederlands Kanker Instituut, Amsterdam (NL)

(21) Appl. No.: 13/422,788

(22) Filed: Mar. 16, 2012

Related U.S. Application Data
(63) Continuation-in-part of application No. PCT/NL2010/050594, filed on Sep. 15, 2010.
(60) Provisional application No. 61/242,935, filed on Sep. 16, 2009.

(30) Foreign Application Priority Data
Sep. 17, 2009 (EP) 09170573.1

(51) Int. Cl. A61K 39/395; C40B 30/04; C40B 40/08; A61P 35/04; C07H 21/04; C07H 21/02; C07K 16/18; C12Q 1/68; A61K 31/7088

(52) U.S. Cl. 424/139.1; 435/6.13; 506/9; 506/17; 514/44 A; 536/24.5; 530/387.9

(57) ABSTRACT

The invention relates to the use of an inhibitor of one of the following polypeptides, wherein the polypeptide is represented by the following sequences selected from the following group SEQ ID NO:1-32, each of the polypeptide being preferably as identified in claim 1 as a medicament, preferably for preventing, delaying and/or treating metastasis in a cancer patient. The invention also relates to a diagnostic portfolio comprising or consisting of isolated nucleic acid sequences, their complement or portions thereof, of a combination of genes selected from the groups consisting of genes represented by the following sequences SEQ ID NO:1-32 or SEQ ID NO:1-169.

### RELATED APPLICATIONS

[0001] This application is a continuation-in-part of PCT international application Ser. No. PCT/NL2010/050594, filed Sep. 15, 2010, designating the United States, which claims the benefit of U.S. Provisional Application No. 61/242,935, filed Sep. 16, 2009, and claims the benefit of European Application No. 09170573.1, filed Sep. 17, 2009. The entire contents of the aforementioned patent applications are incorporated herein by this reference.

### FIELD OF THE INVENTION

[0002] The invention relates to the use of an inhibitor of one of the following polypeptides, wherein the polypeptide is represented by the following sequences selected from the following group SEQ ID NO:1-32, each of the polypeptide being preferably as identified in claim 1 as a medicament, preferably for preventing, delaying and/or treating metastasis in a cancer patient. The invention also relates to an ex vivo method of prognosticating metastasis in a cancer patient comprising identifying differential modulation of a gene (relative to the expression of a same gene in a control) in a combination of genes selected from the groups consisting of genes represented by the following sequences SEQ ID NO:1-169 and/or SEQ ID NO:1-32.

### BACKGROUND OF THE INVENTION

[0003] Metastatic spread of tumor cells is a highly complex process in which tumor cells have to overcome multiple barriers and complete all the steps of a so-called “metastatic cascade”. In carcinomas, the most frequent solid tumors that originate from epithelial tissue, these steps involve disruption of normal epithelial cell-cell contacts, breaching of the basement membrane, invasion of the neighboring tissue, intravasation in blood or lymph vessels, transport through the vessels, extravasation and growth at secondary sites (Gupta and Massague, 2006). Several of these steps require the acquisition of cell motility, with disruption of the normal epithelial organization as a prerequisite (Cavallaro and Christofori, 2004). It has often been suggested that these processes involve the hijacking by cancer cells of an embryonic program known as epithelial-to-mesenchymal transition (EMT) in which epithelial cells acquire more flexible and mobile properties reminiscent to those of mesenchymal cells (Thiery and Sleeman, 2006; Yang and Weinberg, 2008). One main feature of EMT is the downregulation of epithelial proteins, most predominantly E-cadherin. In addition, cells also often acquire expression of mesenchymal proteins such as N-cadherin.

[0004] Classically, metastasis has been considered a late and rare event in carcinoma progression (Fidler, 2003). Through selection processes or stochastically, some cells in a primary tumor are believed to acquire new alterations that give them the potential to metastasize. More recently, a model proposed that, as a function of the type of mutation driving primary tumorigenesis, some tumors are endowed early on with a proclivity to metastasize (Bernards and Weinberg, 2002). Other alterations occurring later in tumorigenesis would ultimately endow a subset of the tumor cells with full metastatic potential. This idea originates from the observation that gene-expression classifiers based on the genetic make-up of the bulk of primary breast cancer cells can predict tumor recurrence (van de Vijver et al., 2002; Ramaswamy et al., 2003). Consistent with this view, it has recently been shown that some oncogenes that allow escape from failsafe cell cycle programs, a prerequisite of tumorigenesis, simultaneously induce EMT in breast epithelial cells (Ansieau et al., 2008), thereby favoring metastatic dissemination.

[0005] Identifying the genes that contribute to the metastatic process is key to the understanding of metastasis, as well as to the development of new therapies. Several cancer therapies had already been developed. However, none of them had been entirely successful. This is why there is still a need for identifying new compounds that could be used for treating cancer.

[0006] To identify novel metastasis genes, we previously exploited Rat Intestinal Epithelial (RIE-1) cells to perform a genome-wide screen for suppressors of anoikis (detachment-induced cell death) (Douma et al., 2004). This led to the identification of the neurotrophic receptor tyrosine kinase TrkB, which upon co-expression with its primary ligand BDNF converted parental cells from anoikis-sensitive, non-oncogenic cells into anoikis-resistant, tumorigenic and highly metastatic cells (Douma et al., 2004) (Geiger and Peeper, 2005). As these cells, as well as independently engineered TrkB-expressing Rat Kidney epithelial (RK3E) cells, completely depend on TrkB activity for their oncogenic and metastatic potential, and because this is manifested with very short latencies (Douma et al., 2004 and this paper), we took advantage of these robust cell systems to screen for novel critical metastasis genes.

### DESCRIPTION OF THE INVENTION

[0007] Metastatic spread of tumor cells accounts for most of cancer mortality, yet many of its driving mechanisms remain to be elucidated. By combining genetic and functional analysis with RNAi in a metastasis model, we identify here a strict requirement for the transcription factor Fra-1 (Fos-related antigen-1) in tumor cell dissemination. This was associated with a critical role for Fra1 in epithelial-to-mesenchymal transition (EMT), cell migration and invasion, all processes contributing to metastasis. In support of these observations, we demonstrate that Fra-1 depletion from human breast cancer cells suppresses their ability to metastasize from orthotopic primary tumors. Underscoring a key role for Fra-1 in breast cancer metastasis, microarray analysis of Fra-1-depleted breast cancer cells identified a gene-expression signature that predicted tumor recurrence with high accuracy. In addition, we identified 168 gene targets of Fra-1 whose expression is significantly altered in metastasized cells. These genes are identified in Table 2 and any combination thereof could be used as a classifier as explained herein. In addition, among these 168 genes and Fosl1 (encoding Fra1) (i.e. among these 169 genes), we identified 32 genes including Fosl1 as being significantly over-expressed in poor prognosis breast cancer cells. These genes were classified in functional clusters (see Table 5). Given the prevalence of Fra-1 overexpression in breast cancer and other tumors, these data strongly suggest that inhibition of at least one of these genes can be used for treating cancer and especially metastasis. Altogether, the results presented herein indicate that Fra1 and/or some of its downstream effectors may represent valuable targets in preventing, delaying and/or treating metastasis development in cancer, preferably breast cancer.

### Ex Vivo Methods

[0008] In a first aspect, there is provided an ex vivo method of prognosticating metastasis in a cancer patient comprising identifying differential modulation of a gene (relative to the expression of a same gene in a baseline) in a combination of genes selected from the groups consisting of genes represented by the following sequences SEQ ID NO:1-169 or SEQ ID NO:1-32.

[0009] In the context of the invention, “prognosticating” means either a predictive risk assessment of a cancer patient for metastasing (i.e. predict the presence of metastases in the future, or pre-symptomatic prediction of risk of metastasis) or an assessment of a metastasized cancer in a patient. It may also refer to the likelihood that a patient will respond to a given therapy or to the response of a patient to a therapy he has already been administered. Such a prognostication method is crucial to have since usually once metastasis has been assessed in a cancer patient, his/her chances of survival decrease dramatically.

[0010] In the context of the invention, a “patient” may be an animal or a human being. Preferably, a patient is a human being.

[0011] In the context of the invention, “metastasis” preferably referred to “metastasis” as assessed in a cancer patient by ultrasound examination of lymph nodes, liver, thorax or any other organ suitable for ultrasound examination, lymph node dissection, scintigraphy of the bones or any other organs suitable for scintigraphy, standard radiography or any other technique suitable for the detection of metastasis. More preferably, “metastasis” refers to the “detection of a metastatic activity” within tumour cells in one of the in vivo animal models as described hereafter. Metastasis can be best studied in vivo in xenograft experiments in mice (nude mice or other suitable mouse strains). Briefly, approximately 1.10⁵ to 1.10⁷ tumour cells are injected either sub-cutaneously (as described in Douma S., et al (2004), Nature, 430:1034-1040), or orthotopically (that is, in the organ or tissue that corresponds to the tissue type of the tumour cells). For example, breast tumour cells are injected into a mammary gland (as described in Erler J. T., et al, (2006), Nature, 440: 1222-1226). Alternatively, cells can be injected directly in the blood circulation of the mice (as described in Erler J. T., et al, (2006), Nature, 440: 1222-1226). The visualisation of at least one visible lesion formed by tumour cells at a site distant from the site of injection reveals a metastatic activity of a tumour cell. Detection of a lesion is usually carried out by microscopic analysis of a series of cross sections of paraffin-embedded tissue. A visible metastatic lesion may comprise at least 4, 6, 8, 10, 12, 14, 15, 17, 19, 20, 22, 24, 25 tumour cells or more. Seeding and growth of metastases will occur at time points depending on the type of tumour cell, typically starting at several days after inoculation, or several weeks or months.

[0012] In the context of the invention, a “gene” preferably means a nucleotide acid molecule which is represented by a nucleotide acid sequence and which encodes a protein or polypeptide. A gene may comprise a regulatory region.

[0013] In the context of the invention, “a combination of genes selected from the group consisting of genes represented by the following sequences SEQ ID NO:1-32” preferably means:

“A gene or a nucleotide wherein the nucleotide sequence is selected from the groups consisting of:

[0014] (1) a nucleotide sequence encoding an enzyme ABHD11, AURKB, CHML, EZH2, FEN1, IGFBP3, PAICS, PCOLN3, PPP2R3A, PTGES, PTP4A1, and SCD,

[0015] (2) a nucleotide sequence encoding a transcription factor E2F1, FOSL1, and FOXM1,

[0016] (3) a nucleotide sequence encoding a structural protein C22orf18, CHAF1A, H2AFZ, SMTN, TJAP1, D21S2056E,

[0017] (4) a nucleotide sequence encoding a receptor ADORA2B;

[0018] (5) a nucleotide sequence encoding an adhesion molecule MTDH,

[0019] (6) a nucleotide sequence encoding an apoptose inhibitor BIRC5 and PHLDA1

[0020] (7) a nucleotide sequence encoding a protein involved in DNA replication/transcription MCM10, MCM2 and TRFP and

[0021] (8) a nucleotide sequence encoding a SEC14L1, SFN, SH3GL1 and YTHDF1”.

[0022] In the context of the invention, a “cancer” in the expression a “cancer patient” preferably means that a cancer has already been diagnosed in a given patient. Using a method of the invention, metastasis can be prognosticated in any kind of cancer. Preferably, a cancer is such that it is already known to the skilled person that such cancer can potentially lead to metastasis. In another preferred embodiment, a cancer is such that it is technically possible to isolate a sample containing a tumour cell. A cancer may be melanoma, colon, prostate, lung, thyroid, or breast cancer. A preferred cancer is breast cancer.

[0023] “Modulated” genes are preferably those that are differentially expressed as up regulated or down regulated in non-normal cells (tumour cells or metastasised tumour cells). Up regulation and down regulation are relative terms meaning that a detectable difference (beyond the contribution of noise in the system used to measure it) is found in the amount of expression of the genes relative to a baseline. In this case, a baseline preferably comes from a pool of non cancer patients, or preferably patients with cancer but without detectable metastasis. A pool of these patients preferably contains 1, 3, 5, 10, 20, 30, 100, 400, 500, 600 or more patients. The expression level of a gene of interest in the non-normal cells is then considered either up regulated or down regulated relative to a baseline level using the same measurement method.

[0024] In the context of the use of diagnostic portfolios, a baseline is the measured gene expression of a large pool of cancer patients. Usually, large means at least 50 cancer patients, at least 70, 100, 150, 200, 250, 300, 350, 400, 450, 500, 550, 600 or more. Preferably, the gene expression levels in this large pool of cancer patients is used in this application to generate a good and a poor prognostic centroids as extensively explained in the experimental part in the section entitled “Classifier generation”.

[0025] The assessment of the expression level of a gene in order to assess whether a gene is modulated is preferably performed using classical molecular biology techniques to detect mRNA levels, such as (real time) reverse transcriptase PCR (whether quantitative or semi-quantitative), mRNA (micro)array analysis or Northern blot analysis, or other methods to detect RNA. Alternatively, according to another preferred embodiment, in a prognosticating method the expression level of a gene is determined indirectly by quantifying the amount of the polypeptide encoded by said gene. Quantifying a polypeptide amount may be carried out by any known techniques. Preferably, polypeptide amount is quantified by Western blotting. The skilled person will understand that alternatively or in combination with the quantification of an identified gene and/or corresponding polypeptide, the quantification of a substrate of said corresponding polypeptide or of any compound known to be associated with the function of said corresponding polypeptide or the quantification of the function or activity of said corresponding polypeptide using a specific assay is encompassed within the scope of the prognosticating method of the invention. In a preferred embodiment, the assessment of the expression level of a gene is carried out using (micro)arrays as later defined herein.

[0026] Since the expression levels of a gene and/or amounts of a corresponding polypeptide may be difficult to be measured in a cancer patient, a sample from a patient is preferably used. According to another preferred embodiment, the expression level (of a gene or polypeptide) is determined ex vivo in a sample obtained from a patient. A sample may be liquid, semi-liquid, semi-solid or solid. A preferred sample comprises 100 or more tumour cells and/or a tumour tissue from a cancer patient to be tested taken in a biopsy. Alternatively and or in combination with earlier preferred embodiment, a sample preferably comprises blood of a patient. The skilled person knows how to isolate and optionally purify RNA and/or protein present in such a sample. In case of RNA, the skilled person may further amplify it using known techniques.

[0027] An increase (or up regulation) (which is synonymous with a higher expression level) or decrease (or down regulation) (which is synonymous with a lower expression level) of the expression level of a gene (or steady state level of the encoded polypeptide) is preferably defined as being a detectable change of the expression level of a gene (or steady state level of the encoded polypeptide or any detectable change in the biological activity of the polypeptide) using a method as defined earlier on as compared to the expression level of a corresponding gene (or steady state level of the corresponding encoded polypeptide) in a baseline. According to a preferred embodiment, an increase or decrease of a polypeptide activity is quantified using a specific assay for the polypeptide activity.

[0028] Preferably, an increase of the expression level of a gene means an increase of at least 5% of the expression level of said gene using arrays. More preferably, an increase of the expression level of a gene means an increase of at least 10%, even more preferably at least 20%, at least 30%, at least 40%, at least 50%, at least 70%, at least 90%, at least 150% or more.

[0029] Preferably, a decrease of the expression level of a gene means a decrease of at least 5% of the expression level of said gene using arrays. More preferably, a decrease of the expression level of a gene means an decrease of at least 10%, even more preferably at least 20%., at least 30%, at least 40%, at least 50%, at least 70%, at least 90%, at least 150% or more.

[0030] Preferably, an increase of the expression level of a polypeptide means an increase of at least 5% of the expression level of said polypeptide using western blotting. More preferably, an increase of the expression level of a polypeptide means an increase of at least 10%, even more preferably at least 20%, at least 30%, at least 40%, at least 50%, at least 70%, at least 90%, at least 150% or more.

[0031] Preferably, a decrease of the expression level of a polypeptide means a decrease of at least 5% of the expression level of said polypeptide using western blotting. More preferably, a decrease of the expression level of a polypeptide means a decrease of at least 10%, even more preferably at least 20%, at least 30%, at least 40%, at least 50%, at least 70%, at least 90%, at least 150% or more.

[0032] Preferably, an increase of a polypeptide activity means an increase of at least 5% of said polypeptide activity using a suitable assay. More preferably, an increase of said polypeptide activity means an increase of at least 10%, even more preferably at least 20%, at least 30%, at least 40%, at least 50%, at least 70%, at least 90%, at least 150% or more.

[0033] Preferably, a decrease of a polypeptide activity means a decrease of at least 5% of said polypeptide activity using a suitable assay. More preferably, a decrease of said polypeptide activity means a decrease of at least 10%, even more preferably at least 20%, at least 30%, at least 40%, at least 50%, at least 70%, at least 90%, at least 150% or more.

[0034] In a preferred prognosticating method of the invention, the expression level of more than one, more preferably of at least 1, 2, 3, 4, 5, 6, 7, 8, 9, 10, 11, 12, 13, 14, 15, 16, 17, 18, 19, 20, 21, 22, 23, 24, 25, 26, 27, 28, 29, 30, 31, 32, 35, 40, 45, 50, 55, 60, 65, 70, 75, 80, 85, 90, 95, 100, 105, 110, 115, 120, 125, 130, 135, 140 145, 150, 155, 160, 165, 168, 169 genes as defined herein, and/or the steady state levels of said corresponding polypeptides are determined. In another preferred method, a gene whose expression level is determined is selected in a combination of genes selected from the groups consisting of genes represented by the following sequences SEQ ID NO:1-32 or SEQ ID NO:1-169. Each combination of 1 till 32 genes of the first group, respectively 1 till 169 of the second group may be used. In a preferred embodiment, the 169 genes of the group SEQ ID NO:1-169 are being used. In another preferred embodiment, the 32 genes of the group SEQ ID NO:1-32 are being used. In another preferred embodiment, a gene from each cluster from the group formed by SEQ ID NO:1-32 is chosen. The genes classified as encoding enzymes are preferred. The gene FOSL1 is a preferred one. The gene ADORA2B is another preferred one. Table 3 identifies the 32 genes of SEQ ID NO:1-32 (annotation and accession numbers). The gene identified as number 1 will have its cDNA sequence being represented by SEQ ID NO:1. The same holds for other genes identified in Table 3. All the 169 genes represented by SEQ ID NO: 1-169 are identified in Table 2. Table 5 identifies the classification of genes into cluster and identifies their corresponding SEQ ID NO. The expression level of each of the 32 genes having SEQ ID NO 1-32 has been found to be up-regulated or increased in a metastasized cell by comparison to a non-metastasized cell. The genes presented in table 6 are also preferred. Table 6 identifies twelve Fra-1 regulated genes that were found to be essential for metastasis.

[0035] A reliable method for prognosticating metastasis may be carried out based on a sub combination of SEQ ID NO: 1-32 or of SEQ ID NO:1-169.

[0036] (Micro)arrays (or other high throughput screening devices) comprising the genes (nucleotides, nucleic acids), or polypeptides is a preferred way for carrying out a method of the invention. A microarray is a solid support or carrier containing one or more immobilised nucleic acid or polypeptide fragments for analysing nucleic acid or amino acid sequences or mixtures thereof (see e.g. WO 97/27317, WO 97/22720, WO 97/43450, EP 0 799 897, EP 0 785 280, WO 97/31256, WO 97/27317, WO 98/08083 and Zhu and Snyder, 2001, Curr. Opin. Chem. Biol. 5: 40-45). (Micro)array technology allows for the measurement of the steady-state mRNA level of thousands of genes simultaneously thereby presenting a powerful tool for identifying gene modulation for a given group of genes as identified herein. Two microarray technologies are currently in wide use. The first are cDNA arrays and the second are oligonucleotide arrays. Although differences exist in the construction of these chips, essentially all downstream data analysis and output are the same. The product of these analyses are typically measurements of the intensity of the signal received from a labelled probe used to detect a cDNA sequence from the sample that hybridizes to a nucleic acid sequence at a known location on the microarray. Typically, the intensity of the signal is proportional to the quantity of cDNA, and thus mRNA, expressed in a cell from a cancer patient to be tested. A large number of such techniques are available and useful. Preferred methods for determining gene expression can be found in U.S. Pat. Nos. 6,271,002 to Linsley, et al.; 6,218,122 to Friend, et al.; 6,218,114 to Peck, et al.; and 6,004,755 to Wang, et al., the disclosure of each of which is incorporated herein by reference.

[0037] Analysis of the expression levels is conducted preferably by measuring expression levels using these techniques. Currently, this is best done by generating a matrix of the expression intensities of genes in a test sample (RNA from cells from a cancer patient to be tested) using a single channel hybridisation on a microarray platform, and comparing these intensities with the one of a reference group or baseline (in this case, a good and a poor prognosis centroid as earlier identified herein). For instance, the gene expression intensities from a non normal tissue (cancer) can be compared with the expression intensities generated from non normal tissues of the same type. It preferably means that within the context of the invention, a “control” refers to a large number of cancer patients as defined earlier herein preferably using the method as earlier defined herein.

[0038] Preferably, using its gene expression intensities, each sample is assigned to a good prognosis or bad prognosis group using a Single Sample Predictor. In this preferred method, each patient is assigned to the nearest centroid as determined by the highest Spearman rank order correlation score between the gene expression value of the corresponding gene sets of each sample and the centroid values of the ‘poor prognosis’ and ‘good prognosis’ centroid. A classifier of the invention is preferably used as described in Hu et al 2006.

[0039] In a further aspect, there is provided a second ex vivo method, wherein the method identified above is used to prognosticate the absence of metastasis in a cancer patient comprising identifying a lack of differential modulation of a gene (relative to the expression of a same gene in a control) in a combination of a gene selected from the groups consisting of genes represented by the following sequences SEQ ID NO:1-32 or SEQ ID NO:1-169.

[0040] All elements (for example type of cancer, identity of a patient, way of identifying a modulation of a gene) of said second method have already been identified for the first method. An absence of metastasis is preferably assessed the same way as earlier defined herein (scintigraphy or in an in vivo animal model). In a more preferred method, the absence of metastasis is prognosticated for a one, two, three, four, five year period or longer. Each of these methods may be optionally used for deciding a preferred treatment for the patient. For example, a patient for whom the gene expression pattern indicates a good prognosis (i.e. no metastasis) will receive standard treatment (i.e. less aggressive treatment). As another example, a patient for whom the gene expression pattern indicates a poor prognosis (i.e. metastasis) will receive a more aggressive treatment. Furthermore, the Fra-1 gene expression profile as identified herein (i.e. a combination of genes selected from the groups consisting of genes represented by the following sequences SEQ ID NO:1-32 or SEQ ID NO:1-169) may be used to identify those patients that are expected to benefit from a targeted inhibition of one or more genes from SEQ ID NO:1-32. In one preferred embodiment, one first identifies whether in a patient, preferably belonging to a poor prognosis group, there is a gene selected from the group SEQ ID NO:1-32 which is up regulated by comparison to a baseline as defined herein.

[0041] If such a gene is found, it is preferred to treat such an individual by using an inhibitor of said gene. The invention therefore allows a personalized treatment of this type of patient.

### Diagnostic Portfolio

[0042] Another aspect of the invention relates to a diagnostic portfolio comprising or consisting of isolated nucleic acid (or nucleotide) sequences, their complements, or portions thereof of a combination of genes selected from the groups consisting of a gene represented by the following sequences SEQ ID NO:1-32 or SEQ ID NO:1-169. Diagnostic portfolios comprising or consisting of any combinations or sub combinations as defined herein are also encompassed by the present invention.

[0043] A preferred diagnostic portfolio comprises a matrix suitable for identifying the differential expression of the genes contained therein. A more preferred diagnostic portfolio comprises a matrix, wherein said matrix is employed in a microarray. Said microarray is preferably a cDNA or oligonucleotide microarray.

[0044] Markers (i.e. genes or nucleic acids, nucleotides) used in a diagnostic portfolio have already been defined in the previous section.

### Kit

[0045] In a further aspect, there is provided an article including a representation of the gene expression profiles that make up the portfolios useful for prognosticating metastasis or prognosticating an absence of metastasis. These representations are reduced to a medium that can be automatically read by a machine such as computer readable media (magnetic, optical, and the like). The articles can also include instructions for assessing the gene expression profiles in such media. For example, the articles may comprise a CD ROM having computer instructions for comparing gene expression profiles of the portfolios of genes described above. The articles may also have gene expression profiles digitally recorded therein so that they may be compared with gene expression data from a cancer patient sample. Alternatively, the profiles can be recorded in different representational format. A graphical recordation is one such format. Different types of articles of manufacture according to the invention are media or formatted assays used to reveal gene expression profiles. These can comprise or consist of, for example, microarrays in which sequence complements or probes are affixed to a matrix to which the sequences indicative of the genes of interest combine creating a readable determinant of their presence. When such a microarray contains an optimized portfolio great savings in time, process steps, and resources are attained by minimizing the number of cDNA or oligonucleotides that must be applied to the substrate, reacted with the sample, read by an analyser, processed for results, and (sometimes) verified. Other articles according to the invention can be fashioned into reagent kits for conducting hybridization, amplification, and signal generation indicative of the level of expression of the genes in the portfolios as defined herein. Kits made according to the invention include formatted assays for determining the gene expression profiles. These can include all or some of the materials needed to conduct the assays such as reagents and instructions. Therefore, in a further aspect, there is provided a kit for prognosticating metastasis or prognosticating the absence of metastasis in a cancer patient comprising reagents for detecting nucleic acid sequences, their complements, or portions thereof in a combination of genes selected from the groups consisting of genes represented by the following sequences SEQ ID NO:1-32 or SEQ ID NO:1-169. Kits comprising or consisting of any combinations or sub combinations as defined herein are also encompassed by the present invention.

[0046] A preferred kit further comprises reagents for conducting a microarray analysis. More preferably, a kit further comprising a medium through which said nucleic acid sequences, their complements, or portions thereof are assayed. More preferably, said medium is a microarray. A kit may further comprise instructions.

### Inhibitor

[0047] In a further aspect, there is provided an inhibitor of a polypeptide, said polypeptide comprising an amino acid sequence that is encoded by a nucleotide sequence is selected from the groups consisting of:

[0048] (1) a nucleotide sequence encoding an enzyme ABHD11, AURKB, CHML, EZH2, FEN1, IGFBP3, PAICS, PCOLN3, PPP2R3A, PTGES, PTP4A1, and SCD,

[0049] (2) a nucleotide sequence encoding a transcription factor E2F1, FOSL1, and FOXM1,

[0050] (3) a nucleotide sequence encoding a structural protein C22orf18, CHAF1A, H2AFZ, SMTN, TJAP1, D21S2056E,

[0051] (4) a nucleotide sequence encoding a receptor ADORA2B;

[0052] (5) a nucleotide sequence encoding an adhesion molecule MTDH,

[0053] (6) a nucleotide sequence encoding an apoptose inhibitor BIRC5 and PHLDA1

[0054] (7) a nucleotide sequence encoding a protein involved in DNA replication/transcription MCM10, MCM2 and TRFP and

[0055] (8) a nucleotide sequence encoding a SEC14L1, SFN, SH3GL1 and YTHDF1,

said inhibitor being preferably for use as a medicament, more preferably for preventing, delaying and/or treating metastasis in a cancer patient.

[0056] This polypeptide may also be identified by referring to the nucleotide encoding it which is selected from the groups consisting of:

[0057] (1) a nucleotide sequence encoding an enzyme ABHD11, AURKB, CHML, EZH2, FEN1, IGFBP3, PAICS, PCOLN3, PPP2R3A, PTGES, PTP4A1, and SCD and that has at least 60% identity with SEQ ID NO:1, 3, 7, 10, 11, 15, 19, 20, 22, 23, 24, 25 and a nucleotide sequence that encodes an amino acid sequence that has at least 60% amino acid identity with an amino acid sequence encoded by a nucleotide sequence selected from SEQ ID NO: 1, 3, 7, 10, 11, 15, 19, 20, 22, 23, 24, 25,

[0058] (2) a nucleotide sequence encoding a transcription factor E2F1, FOSL1, and FOXM1 and that has at least 60% identity with SEQ ID NO: 9, 12, 13 and a nucleotide sequence that encodes an amino acid sequence that has at least 60% amino acid identity with an amino acid sequence encoded by a nucleotide sequence selected from SEQ ID NO: 9, 12, 13,

[0059] (3) a nucleotide sequence encoding a structural protein C22orf18, CHAF1A, H2AFZ, SMTN, TJAP1, D21S2056E and that has at least 60% identity with SEQ ID NO:5, 6, 14, 29, 30, 8 and a nucleotide sequence that encodes an amino acid sequence that has at least 60% amino acid identity with an amino acid sequence encoded by a nucleotide sequence selected from SEQ ID NO: 5, 6, 14, 29, 30, 8,

[0060] (4) a nucleotide sequence encoding a receptor ADORA2B and that has at least 60% identity with SEQ ID NO:2 and a nucleotide sequence that encodes an amino acid sequence that has at least 60% amino acid identity with an amino acid sequence encoded by a nucleotide sequence selected from SEQ ID NO:2,

[0061] (5) a nucleotide sequence encoding an adhesion molecule MTDH and that has at least 60% identity with SEQ ID NO:18 and a nucleotide sequence that encodes an amino acid sequence that has at least 60% amino acid identity with an amino acid sequence encoded by a nucleotide sequence selected from SEQ ID NO: 18,

[0062] (6) a nucleotide sequence encoding an apoptose inhibitor BIRC5 and PHLDA1 and that has at least 60% identity with SEQ ID NO:4, 21 and a nucleotide sequence that encodes an amino acid sequence that has at least 60% amino acid identity with an amino acid sequence encoded by a nucleotide sequence selected from SEQ ID NO:4, 21,

[0063] (7) a nucleotide sequence encoding a protein involved in DNA replication/transcription MCM10, MCM2 and TRFP and that has at least 60% identity with SEQ ID NO:16, 17, 31 and a nucleotide sequence that encodes an amino acid sequence that has at least 60% amino acid identity with an amino acid sequence encoded by a nucleotide sequence selected from SEQ ID NO: 16, 17, 31,

[0064] and

[0065] (8) a nucleotide sequence encoding a SEC14L1, SFN, SH3GL1 and YTHDF1 and that has at least 60% identity with SEQ ID NO: 26, 27, 28, 32 and a nucleotide sequence that encodes an amino acid sequence that has at least 60% amino acid identity with an amino acid sequence encoded by a nucleotide sequence selected from SEQ ID NO: 26, 27, 28, 32,

said inhibitor being preferably for use as a medicament, more preferably for preventing, delaying and/or treating metastasis in a cancer patient.

[0066] Inhibitors of enzymes as identified herein are preferred Inhibitors of FOSL1 are also preferred. Inhibitors of ADORA2B are also preferred.

[0067] An inhibitor of a polypeptide may also be defined as being an inhibitor of a polypeptide, said polypeptide comprising an amino acid sequence that is encoded by a nucleotide sequence is selected from the groups consisting of:

(a) a nucleotide sequence that has at least 60% identity with a sequence selected from SEQ ID NO: 1-32; and,
(b) a nucleotide sequence that encodes an amino acid sequence that has at least 60% amino acid identity with an amino acid sequence encoded by a nucleotide sequence selected from SEQ ID NO; 1-32,

[0068] Wherein said inhibitor is being preferably for use as a medicament, more preferably for preventing, delaying and/or treating metastasis in a cancer patient.

[0069] Through out the application, a polypeptide may be replaced by “a polypeptide comprising an amino acid sequence that is encoded by a nucleotide sequence selected from:

(a) a nucleotide sequence that has at least 60% identity with a sequence selected from SEQ ID NO: 1-32; and,
(b) a nucleotide sequence that encodes an amino acid sequence that has at least 60% amino acid identity with an amino acid sequence encoded by a nucleotide sequence selected from SEQ ID NO; 1-32” unless otherwise indicated.

[0070] An inhibitor is a compound which is able to decrease an activity of a polypeptide and/or to decrease its expression level and/or sub cellular localisation.

[0071] A “decrease of an activity of a polypeptide or a decrease of the expression level of gene or nucleotide encoding said polypeptide” is herein understood to mean any detectable change in a biological activity exerted by said polypeptide or in the expression level of said polypeptide as compared to said activity or expression of a wild type polypeptide such as the one encoded by SEQ ID NO:1-32. The decrease of the level or of the amount of a nucleotide encoding said polypeptide is preferably assessed using classical molecular biology techniques such as (real time) PCR, arrays or Northern analysis. Alternatively, according to another preferred embodiment, the decrease of the expression level of said polypeptide is determined directly by quantifying the amount of said polypeptide. Quantifying a polypeptide amount may be carried out by any known technique such as Western blotting or immunoassay using an antibody raised against said polypeptide. The skilled person will understand that alternatively or in combination with the quantification of a nucleic acid sequence and/or the corresponding polypeptide, a quantification of a substrate or a quantification of the expression of a target gene of said polypeptide or of any compound known to be associated with a function or activity of said polypeptide or the quantification of said function or activity of said polypeptide using a specific assay may be used to assess the decrease of an activity or expression level of said polypeptide.

[0072] Preferably, a decrease or a down-regulation of the expression level of a nucleotide sequence encoding said polypeptide means a decrease of at least 5% of the expression level of a nucleotide sequence using arrays or Northern blot. More preferably, a decrease of the expression level of a nucleotide sequence means an decrease of at least 10%, even more preferably at least 20%, at least 30%, at least 40%, at least 50%, at least 70%, at least 90%, at least 100%, or more. Preferably, the expression is no longer detectable. In another preferred embodiment, a decrease of the expression level of said polypeptide means a decrease of at least 5% of the expression level of said polypeptide using western blotting and/or using ELISA or a suitable assay. More preferably, a decrease of the expression level of said polypeptide means a decrease of at least 10%, even more preferably at least 20%, at least 30%, at least 40%, at least 50%, at least 70%, at least 90%, at least 150% or more. Preferably, the expression is no longer detectable. In another preferred embodiment, a decrease of a polypeptide activity means a decrease of at least 5% of said activity using a suitable assay as earlier defined herein. More preferably, a decrease of said activity means a decrease of at least 10%, even more preferably at least 20%, at least 30%, at least 40%, at least 50%, at least 70%, at least 90%, at least 150% or more. Preferably, said activity is no longer detectable

[0073] An inhibitor may be any compound. The invention also provides a method for identifying additional inhibitors of a polypeptide (see later herein). Preferably an inhibitor is a DNA or RNA molecule, a dominant negative molecule, an inhibiting antibody raised against said polypeptide, a peptide-like molecule (referred to as peptidomimetics) or a non-peptide molecule. Each of these inhibitors is presented in more details below. An inhibitor may act at the level of the polypeptide itself, e.g. by providing an antagonist or inhibitor of said polypeptide to a cell, such as e.g. an inhibiting antibody raised against said polypeptide (named an antibody herein) or a dominant negative form of said polypeptide or an antisense (named antisense molecule herein). An antibody, an antisense molecule or a dominant negative of the invention may be obtained as described below. Alternatively, an inhibitor may act at the level of the nucleotide encoding said polypeptide. In this case, the expression level of polypeptide is decreased by regulating the expression level of a nucleotide sequence encoding said polypeptide.

[0074] Accordingly in a first preferred embodiment, an inhibitor is a DNA molecule.

[0075] The invention provides first a nucleic acid construct comprising all or a part of a nucleotide sequence that encodes a polypeptide that comprises an amino acid sequence that is encoded by a nucleotide sequence selected from:

[0076] (a) a nucleotide sequence that has at least 60, 70, 80, 85, 90, 95, 98 or 99% identity with a nucleotide sequence selected from SEQ ID NO:1-32; and/or,

[0077] (b) a nucleotide sequence that encodes an amino acid sequence that has at least 60, 70, 80, 85, 90, 95, 98 or 99% amino acid identity with an amino acid sequence encoded by a nucleotide sequence selected from SEQ ID NO:1-32.

[0078] Preferably, a nucleotide sequence is operably linked to a promoter that is capable of driving expression of said nucleotide sequence in a cell, more preferably a human and/or tumour cell. Even more preferably, the cell is a human breast cell.

[0079] Accordingly, in a more preferred embodiment, a nucleic acid construct of the invention comprises or consists of a nucleotide sequence that encodes an RNAi agent, i.e. an RNA molecule that is capable of RNA interference or that is part of an RNA molecule that is capable of RNA interference. Such RNA molecules are referred to as small RNA molecules such as siRNA (short interfering RNA, including e.g. a short hairpin RNA). The nucleotide sequence that encodes the RNAi agent preferably has sufficient complementarity with a cellular nucleotide sequence to be capable of inhibiting the expression of a polypeptide that comprises an amino acid sequence that is encoded by a nucleotide sequence selected from:

[0080] a) a nucleotide sequence that has at least 60, 70, 80, 85, 90, 95, 98 or 99% identity with a sequence selected from SEQ ID NO: 1-32; and/or,

[0081] (b) a nucleotide sequence that encodes an amino acid sequence that has at least 60, 70, 80, 85, 90, 95, 98 or 99% amino acid identity with an amino acid sequence encoded by a nucleotide sequence selected from SEQ ID NO: 1-32;

[0082] In an even more preferred embodiment, a nucleic acid construct of the invention comprises or consists of a nucleotide sequence that encodes an RNAi agent capable of inhibiting the expression of a polypeptide that comprises an amino acid sequence that is encoded by a nucleotide sequence selected from:

[0083] a) a nucleotide sequence that has at least 60, 70, 80, 85, 90, 95, 98 or 99% identity with SEQ ID NO:1, 2, 3, 7, 10, 11, 15, 19, 20, 22, 23, 24, 25, 12 as defined herein; and/or,

[0084] (b) a nucleotide sequence that encodes an amino acid sequence that has at least 60, 70, 80, 85, 90, 95, 98 or 99% amino acid identity with an amino acid sequence encoded by a nucleotide sequence selected from SEQ ID NO: 1, 2, 3, 7, 10, 11, 15, 19, 20, 22, 23, 24, 25, 12;

[0085] wherein optionally the nucleotide sequence encoding the RNAi agent is operably linked to a promoter that is capable of driving expression of the nucleotide sequence in a cell, more preferably a human and/or tumour cell. Even more preferably, the cell is a human breast cell.

[0086] The role of each of these genes in metastasis has been unambiguously demonstrated in the example of this application. Therefore, any substance including a nucleic acid construct comprising a sequence encoding an RNAi agent capable of down regulating the expression level of any one of these genes or of any combination thereof as defined herein is a preferred embodiment according to the invention. However, any other substance having this capacity of down regulating the expression level of any of the genes identified by SEQ ID NO:1-32 and preferably identified in a method of the invention as later defined herein is encompassed by the present invention.

[0087] Alternatively or in combination with the antisense approach, one may also use an inactivating approach. In this approach, an inactivating nucleic acid construct is introduced into a cell. Said inactivating construct comprises or consists of a nucleotide molecule which is designed in order to inactivate the expression of a polypeptide. The skilled person knows how to design an inactivating construct. For example, at least part of a gene encoding a polypeptide is replaced by a marker such as the neomycine gene.

[0088] Alternatively or in combination with the antisense and inactivating approaches, one may also use a dominant negative approach. In this approach, a nucleic acid construct is introduced into a cell, wherein said nucleic construct comprises a dominant negative nucleotide sequence that is capable of inhibiting or down-regulating an activity of a corresponding endogenous polypeptide, and wherein, optionally, a dominant negative nucleotide sequence is under the control of a promoter capable of driving expression of said dominant negative nucleotide sequence in a cell. In a preferred embodiment described earlier herein, a nucleic acid construct used herein comprises or consists of a dominant negative of a polypeptide as earlier defined herein. Alternatively, a dominant negative molecule may be directly administered to a subject. The skilled person knows how to design a dominant negative of a polypeptide. Several strategies are already known for designing a dominant negative of a polypeptide depending on the function or activity of said polypeptide. If a polypeptide is a kinase, a dominant negative kinase is usually a truncated kinase without a catalytic domain(s) or with an inactive catalytic domain(s). An inactive catalytic domain may be generated by introducing a point-mutation(s) in said kinase domain(s).

[0089] In a nucleic acid construct of the invention (a dominant negative approach, inactivating approach or antisense approach), a promoter which may be present is preferably a promoter that is specific for a human and/or tumour cell and/or mammary cell. More preferably, a promoter chosen is specific for and functional in a human and/or tumour cell and/or mammary cell. A promoter that is specific for a human and/or tumour cell and/or mammary is a promoter with a transcription rate that is higher in such a cell than in other types of cells. Preferably the promoter's transcription rate in such a cell is at least 1.1, 1.5, 2.0 or 5.0 times higher than in a other types of cells as measured by PCR of the construct in such a cell as compared to other types of cells.

[0090] A nucleic acid construct as defined herein is for use as a medicament, preferably for preventing, delaying and/or treating metastasis in a cancer patient.

[0091] In a preferred embodiment a nucleic acid construct is a viral gene therapy vector selected from gene therapy vectors based on an adenovirus, an adeno-associated virus (AAV), a herpes virus, a pox virus and a retrovirus. A preferred viral gene therapy vector is an AAV or Lentiviral vector. Such vectors are further described herein below.

[0092] In addition, for some of the polypeptides as defined herein inhibitors have already been identified (see table 4). In addition, inhibitors of ADORA2B are also known: 7-Chloro-4-hydroxy-2-phenyl-1,8-naphthyridine, an A1 adenosine receptor antagonist, CGS-15943, a Highly potent, non-selective A1 adenosine receptor antagonist. These two compounds are commercially available (Sigma). Therefore the invention also encompasses each of these inhibitors for use as a medicament, preferably for preventing, delaying and/or treating metastasis in a cancer patient.

### Use of a Nucleic Acid Construct

[0093] In a further aspect the invention relates to a use of a nucleic acid construct as defined herein for modulating the expression level of a gene and/or activity or steady state level of a polypeptide as defined herein, for the manufacture of a medicament for preventing and/or delaying and/or metastasis in a cancer patient, preferably in a method of the invention as defined herein.

Identification of a Substance Able to Prevent, Delay and/or Treat Metastasis in a Cancer Patient

[0094] In yet a further aspect, the invention relates to a method for identification of a substance capable of preventing, delaying and/or treating metastasis in a cancer patient.

[0095] The method preferably comprises the steps of:

(a) providing a test cell population capable of expressing a nucleotide sequence as present in a nucleic acid construct, wherein said nucleotide sequence is a nucleotide sequence that has at least 60% identity with a sequence selected from SEQ ID NO: 1-32 as identified in claim 1 or SEQ ID NO:1-169 and,
a nucleotide sequence that encodes an amino acid sequence that has at least 60% amino acid identity with an amino acid sequence encoded by a nucleotide sequence selected from SEQ ID NO; 1-32 or SEQ ID NO:1-169;
(b) contacting the test cell population with the substance;
(c) determining the expression level of the nucleotide sequence or the activity or steady state level of the polypeptide in the test cell population contacted with the substance;
(d) comparing the expression, activity or steady state level determined in (c) with the expression, activity or steady state level of the nucleotide sequence or of the polypeptide in a test cell population that has not been contacted with the substance; and, (e) identifying a substance that produces a difference in expression level, activity or steady state level of the nucleotide sequence or the polypeptide, between the test cell population that has been contacted with the substance and the test cell population that has not been contacted with the substance.

[0096] Preferably, in step a), the test cell comprises a nucleic acid construct of the invention. Preferably, in a method the expression levels, activities or steady state levels of more than one nucleotide sequence or more than one polypeptide are compared. Preferably, in a method, a test cell population comprises mammalian cells, more preferably human and/or tumour cells. Even more preferably, a test cell population comprises bone-marrow and/or peripheral blood and/or pluripotent stem cells and/or mammary cells. These cells can be harvested, purified using techniques known to the skilled person. Even more preferably, a test cell population comprises a cell line. Preferably the cell line is a human or rat cell line. Even more preferably, the human cell line LM2 or the rat cell line RK3E is being used. In another preferred embodiment, test cells are part of an in vivo animal model as earlier defined herein. In one aspect the invention also pertains to a substance that is identified in a method the aforementioned methods.

[0097] In a preferred embodiment, “preventing” metastasis means that during at least one, two, three, four, five years, or longer no metastatic lesion will be detected in an in vivo animal model as earlier defined herein and/or in a cancer patient using scintigraphy as earlier defined herein, wherein said tumour cells were treated with said substance by comparison with the potential development of a metastatic lesion in a non-treated control.

[0098] In a preferred embodiment, “delaying” metastasis means that the detection of a metastatic lesion in a given system using the same assays as defined in the previous paragraph treated with said substance is delayed of at least 1, 6, 12, 18, 24, 30, 36, 42, 48, 54, 60, 66 months or longer compared to the time at which detection of one metastatic lesion will occur in a corresponding control non treated with said substance.

[0099] In a preferred embodiment, “treating” metastasis means that there is a detectable decrease of the amount of metastatic lesions in a given system using the same assays as defined in the previous paragraph treated with said substance after at least one month (2, 3, 4, 5, 6, 7, 8, 9, 10, 11, 12 months or longer) compared to the amount of metastatic lesions in the same system which has not been treated. A detectable decrease is preferably defined as being at least 1% decrease, 2%, 3%, 4%, 5%, 6%, 7%, 8%, 9%, 10%, 15%, 20%, 25%, 30%, 35%, 40%, 45%, 50%, 55%, 60%, 65%, 70%, 75%, 80%, 85%, 90%, 95%, or more till no metastase are detectable.

Method for Preventing, Delaying and/or Treating Metastasis

[0100] There is currently no known medicament that may be used in such a method in a cancer patient. The only standard treatments comprise irradiation, hormonal therapy and/or chemotherapy. Accordingly, in a further aspect, the invention provides a method for preventing, delaying and/or treating metastasis in a cancer patient, said method comprising pharmacologically altering the expression level of a gene and/or activity or the steady-state level of a polypeptide encoded by a nucleotide sequence selected from the genes or nucleotide sequences identified in the section entitled “inhibitor”. In this section a polypeptide means a polypeptide for which encoding sequence has been identified in the section entitled “inhibitor”. In a preferred method of the invention, the expression level of a gene and/or activity and/or steady-state level of said polypeptide of is altered in order to mimic its physiological level in a cancer patient known not have metastasis (no detectable metastase) or in a healthy subject.

[0101] The expression “preventing, delaying and/or treating metastasis” is given the same meaning as in previous section.

[0102] The activity or steady-state level of a polypeptide may be altered at the level of the polypeptide itself, e.g. by providing a antagonist or inhibitor of a polypeptide to a patient, preferably to a cell, more preferably to a tumour cell of said cancer patient such as e.g. an antibody against a polypeptide, preferably a neutralizing antibody. For provision of a dominant negative polypeptide or antisense from an exogenous source, a dominant negative polypeptide or antisense may conveniently be produced by expression of a nucleic acid encoding a dominant negative polypeptide or antisense in a suitable host cell as described below. An antibody against a polypeptide of the invention may be obtained as described below.

[0103] Preferably, however, the activity or steady-state level of a polypeptide is altered by regulating the expression level of a nucleotide sequence encoding a polypeptide. Preferably, the expression level of a nucleotide sequence is regulated in a human and/or tumour cell.

[0104] The expression level of a polypeptide may be decreased by providing an inhibitor, preferably an antisense molecule to a human and/or tumour cell, whereby an antisense molecule is capable of inhibiting the biosynthesis (usually the translation) of a nucleotide sequence encoding a polypeptide. Decreasing gene expression by providing antisense or interfering RNA molecules is described below herein and is e.g. reviewed by Famulok et al. (2002, Trends Biotechnol., 20(11): 462-466). An antisense molecule may be provided to a cell as such or it may be provided by introducing an expression construct into a human and/or tumour cell, whereby an expression construct comprises an antisense nucleotide sequence that is capable of inhibiting the expression of a nucleotide sequence encoding a polypeptide, and whereby an antisense nucleotide sequence is under control of a promoter capable of driving transcription of an antisense nucleotide sequence in a human and/or tumour cell. The expression level of a polypeptide may also be decreased by introducing an expression construct into a human and/or tumour cell, whereby an expression construct comprises a nucleotide sequence encoding a factor capable of trans-repression of an endogenous nucleotide sequence encoding a polypeptide. An antisense or interfering nucleic acid molecule may be introduced into a cell directly “as such”, optionally in a suitable formulation, or it may be produce in situ in a cell by introducing into a cell an expression construct comprising a (antisense or interfering) nucleotide sequence that is capable of inhibiting the expression of a nucleotide sequence encoding a polypeptide, whereby, optionally, an antisense or interfering nucleotide sequence is under control of a promoter capable of driving expression of an nucleotide sequence in a human and/or tumour cell.

[0105] The meaning of “increase or decrease the expression of a gene (nucleotide) or corresponding polypeptide” is the same as given in the section entitled “ex vivo methods”.

[0106] A method of the invention preferably comprises the step of administering to a cancer patient a therapeutically effective amount of a pharmaceutical composition comprising an inhibitor as defined herein: a nucleic acid construct for modulating the activity or steady state level of a polypeptide and/or a neutralizing antibody and/or a polypeptide as defined herein. A nucleic acid construct may be an expression construct as further specified herein below. Preferably, an expression construct is a viral gene therapy vector selected from a gene therapy vector based on an adenovirus, an adeno-associated virus (AAV), a herpes virus, a pox virus and a retrovirus. A preferred viral gene therapy vector is an AAV or Lentiviral vector. Alternatively, a nucleic acid construct may be for inhibiting expression of a polypeptide of the invention such as an antisense molecule or an RNA molecule capable of RNA interference (see below). In a method of the invention, a human and/or tumour cell is preferably a cell from a cancer patient suspected to have a high risk of having a metastasised cancer, due for example to its age and/or its genetic background and/or to its diet and/or to the type of cancer he has. Alternatively, in another preferred embodiment, a method of the invention is applied on a cell from a cancer patient diagnosed as having a risk of having a metastasised cancer. A prognosticating method used is preferably one of the inventions already earlier described herein. More preferably, if in such method it has been found that in a patient preferably belonging to a poor prognosis group there is a gene selected from the group SEQ ID NO:1-32 whose expression is up regulated by comparison to a baseline as defined herein, it is preferred to treat such an individual or patient by using an inhibitor of said gene. The invention therefore allows a personalized treatment of this type of patient.

[0107] In a method, a human and/or tumour cell chosen to be treated are preferably isolated from the patient they belong to (ex vivo method). Cells are subsequently treated by altering the activity or the steady state level of a polypeptide of the invention. This treatment is preferably performed by infecting them with a polypeptide and/or a nucleic acid construct of the invention and/or a neutralizing antibody as earlier defined herein. Finally, treated cells are placed back into the patient they belong to.

[0108] In another treating method, the invention mentioned herein may be combined with standard treatments of metastasis such as chemotherapy and/or radiation.

[0109] Although gene therapy is a possibility for preventing, delaying and/or treating metastasis, other possible treatments may also be envisaged. For example, treatment by “small molecule” drugs to steer certain molecular pathways in the desired direction, is also preferred. These small molecules are preferably identified by the screening method of the invention as defined later herein.

### Genes Defined by a SEQ ID NO and Sequence Identity

[0110] It is to be understood that each gene as identified herein by a given Sequence Identity Number (SEQ ID NO 1-169) is not limited to this specific sequence as disclosed. Each gene sequence or nucleotide sequence as identified herein encodes a given protein or polypeptide as identified in Table 3. Throughout this application, each time one refers to a specific nucleotide sequence SEQ ID NO (take SEQ ID NO:1 as example), one may replace it by:

[0111] i. a polypeptide comprising an amino acid sequence that has at least 60% sequence identity with an amino acid sequence SEQ ID NO:1 as identified in Table 3 or in the list of sequences provided herewith as being encoded by SEQ ID NO:1,

[0112] ii. a nucleotide sequence comprising a nucleotide sequence that has at least 60% sequence identity with SEQ ID NO:1 (as example).

[0113] iii. a nucleotide sequences the complementary strand of which hybridizes to a nucleic acid molecule of sequence of (i) or (ii);

[0114] iv. a nucleotide sequence the sequence of which differs from the sequence of a nucleic acid molecule of (iii) due to the degeneracy of the genetic code.

[0115] iv. a nucleotide sequence that encodes an amino acid sequence that has at least 60% amino acid identity with an amino acid sequence encoded by a nucleotide sequence SEQ ID NO:1.

[0116] Each nucleotide sequence or amino acid sequence described herein by virtue of its identity percentage (at least 60%) with a given nucleotide sequence or amino acid sequence respectively has in a further preferred embodiment an identity of at least 65%, 70%, 75%, 80%, 85%, 90%, 95%, 97%, 98%, 99% or more identity with the given nucleotide or amino acid sequence respectively. In a preferred embodiment, sequence identity is determined by comparing the whole length of the sequences as identified herein.

[0117] “Sequence identity” is herein defined as a relationship between two or more amino acid (polypeptide or protein) sequences or two or more nucleic acid (polynucleotide) sequences, as determined by comparing the sequences. In the art, “identity” also means the degree of sequence relatedness between amino acid or nucleic acid sequences, as the case may be, as determined by the match between strings of such sequences. “Similarity” between two amino acid sequences is determined by comparing the amino acid sequence and its conserved amino acid substitutes of one polypeptide to the sequence of a second polypeptide. “Identity” and “similarity” can be readily calculated by known methods, including but not limited to those described in (Computational Molecular Biology, Lesk, A. M., ed., Oxford University Press, New York, 1988; Biocomputing: Informatics and Genome Projects, Smith, D. W., ed., Academic Press, New York, 1993; Computer Analysis of Sequence Data, Part I, Griffin, A. M., and Griffin, H. G., eds., Humana Press, New Jersey, 1994; Sequence Analysis in Molecular Biology, von Heine, G., Academic Press, 1987; and Sequence Analysis Primer, Gribskov, M. and Devereux, J., eds., M Stockton Press, New York, 1991; and Carillo, H., and Lipman, D., SIAM J. Applied Math., 48:1073 (1988).

[0118] Preferred methods to determine identity are designed to give the largest match between the sequences tested. Methods to determine identity and similarity are codified in publicly available computer programs. Preferred computer program methods to determine identity and similarity between two sequences include e.g. the GCG program package (Devereux, J., et al., Nucleic Acids Research 12 (1): 387 (1984)), BestFit, BLASTP, BLASTN, and FASTA (Altschul, S. F. et al., J. Mol. Biol. 215:403-410 (1990). The BLAST X program is publicly available from NCBI and other sources (BLAST Manual, Altschul, S., et al., NCBI NLM NIH Bethesda, Md. 20894; Altschul, S., et al., J. Mol. Biol. 215:403-410 (1990). The well-known Smith Waterman algorithm may also be used to determine identity.

[0119] Preferred parameters for polypeptide sequence comparison include the following: Algorithm: Needleman and Wunsch, J. Mol. Biol. 48:443-453 (1970); Comparison matrix: BLOSSUM62 from Hentikoff and Hentikoff, Proc. Natl. Acad. Sci. USA. 89:10915-10919 (1992); Gap Penalty: 12; and Gap Length Penalty: 4. A program useful with these parameters is publicly available as the “Ogap” program from Genetics Computer Group, located in Madison, Wis. The aforementioned parameters are the default parameters for amino acid comparisons (along with no penalty for end gaps).

[0120] Preferred parameters for nucleic acid comparison include the following: Algorithm: Needleman and Wunsch, J. Mol. Biol. 48:443-453 (1970); Comparison matrix: matches=+10, mismatch=0; Gap Penalty: 50; Gap Length Penalty: 3. Available as the Gap program from Genetics Computer Group, located in Madison, Wis. Given above are the default parameters for nucleic acid comparisons.

[0121] Optionally, in determining the degree of amino acid similarity, the skilled person may also take into account so-called “conservative” amino acid substitutions, as will be clear to the skilled person. Conservative amino acid substitutions refer to the interchangeability of residues having similar side chains. For example, a group of amino acids having aliphatic side chains is glycine, alanine, valine, leucine, and isoleucine; a group of amino acids having aliphatic-hydroxyl side chains is serine and threonine; a group of amino acids having amide-containing side chains is asparagine and glutamine; a group of amino acids having aromatic side chains is phenylalanine, tyrosine, and tryptophan; a group of amino acids having basic side chains is lysine, arginine, and histidine; and a group of amino acids having sulphur-containing side chains is cysteine and methionine. Preferred conservative amino acids substitution groups are: valine-leucine-isoleucine, phenylalanine-tyrosine, lysine-arginine, alanine-valine, and asparagine-glutamine. Substitutional variants of the amino acid sequence disclosed herein are those in which at least one residue in the disclosed sequences has been removed and a different residue inserted in its place. Preferably, the amino acid change is conservative. Preferred conservative substitutions for each of the naturally occurring amino acids are as follows: Ala to ser; Arg to lys; Asn to gln or his; Asp to glu; Cys to ser or ala; Gln to asn; Glu to asp; Gly to pro; His to asn or gln; Ile to leu or val; Leu to ile or val; Lys to arg; gln or glu; Met to leu or ile; Phe to met, leu or tyr; Ser to thr; Thr to ser; Trp to tyr; Tyr to trp or phe; and, Val to ile or leu.

### Recombinant Techniques and Methods for Recombinant Production of a Polypeptide

[0122] If an inhibitor is a polypeptide, said polypeptide can be prepared using recombinant techniques, in which a nucleotide sequence encoding said polypeptide of interest is expressed in a suitable host cell. The present invention thus also concerns the use of a nucleic acid construct, preferably being a vector comprising a nucleic acid molecule being represented by a nucleotide sequence as defined above. Preferably the vector is a replicative vector comprising on origin of replication (or autonomously replication sequence) that ensures multiplication of the vector in a suitable host for the vector. Alternatively the vector is capable of integrating into a host cell's genome, e.g. through homologous recombination or otherwise. A particularly preferred vector is an expression vector wherein a nucleotide sequence encoding a polypeptide as defined above, is operably linked to a promoter capable of directing expression of the coding sequence in a host cell for the vector.

[0123] As used herein, the term “promoter” refers to a nucleic acid fragment that functions to control the transcription of one or more genes, located upstream with respect to the direction of transcription of the transcription initiation site of the gene, and is structurally identified by the presence of a binding site for DNA-dependent RNA polymerase, transcription initiation sites and any other DNA sequences, including, but not limited to transcription factor binding sites, repressor and activator protein binding sites, and any other sequences of nucleotides known to one of skill in the art to act directly or indirectly to regulate the amount of transcription from the promoter. A “constitutive” promoter is a promoter that is active under most physiological and developmental conditions. An “inducible” promoter is a promoter that is regulated depending on physiological or developmental conditions. A “tissue specific” promoter is only active in specific types of differentiated cells/tissues, such as preferably a human and/or tumour and/or mammary cell or tissue derived thereof.

[0124] An expression vector may allow a polypeptide of the invention as defined above to be prepared using recombinant techniques in which a nucleotide sequence encoding said polypeptide is expressed in a suitable cell, e.g. cultured cells or cells of a multicellular organism, such as described in Ausubel et al., “Current Protocols in Molecular Biology”, Greene Publishing and Wiley-Interscience, New York (1987) and in Sambrook and Russell (2001, supra); both of which are incorporated herein by reference in their entirety. Also see, Kunkel (1985) Proc. Natl. Acad. Sci. 82:488 (describing site directed mutagenesis) and Roberts et al. (1987) Nature 328:731-734 or Wells, J. A., et al. (1985) Gene 34: 315 (describing cassette mutagenesis).

[0125] Typically, a nucleic acid encoding said polypeptide is used in an expression vector. The phrase “expression vector” generally refers to nucleotide sequences that are capable of effecting expression of a gene in hosts compatible with such sequences. These expression vectors typically include at least suitable promoter sequences and optionally, transcription termination signals. Additional factors necessary or helpful in effecting expression can also be used as described herein. A nucleic acid or DNA encoding said polypeptide is incorporated into a DNA construct capable of introduction into and expression in an in vitro cell culture. Specifically, DNA constructs are suitable for replication in a prokaryotic host, such as bacteria, e.g., E. coli, or can be introduced into a cultured mammalian, plant, insect, e.g., Sf9, yeast, fungi or other eukaryotic cell lines.

[0126] DNA constructs prepared for introduction into a particular host typically include a replication system recognized by the host, the intended DNA segment encoding the desired polypeptide, and transcriptional and translational initiation and termination regulatory sequences operably linked to the polypeptide-encoding segment. A DNA segment is “operably linked” when it is placed into a functional relationship with another DNA segment. For example, a promoter or enhancer is operably linked to a coding sequence if it stimulates the transcription of the sequence. DNA for a signal sequence is operably linked to DNA encoding a polypeptide if it is expressed as a pre protein that participates in the secretion of said polypeptide. Generally, DNA sequences that are operably linked are contiguous, and, in the case of a signal sequence, both contiguous and in reading phase. However, enhancers need not be contiguous with the coding sequences whose transcription they control. Linking is accomplished by ligation at convenient restriction sites or at adapters or linkers inserted in lieu thereof.

[0127] The selection of an appropriate promoter sequence generally depends upon the host cell selected for the expression of the DNA segment. Examples of suitable promoter sequences include prokaryotic, and eukaryotic promoters well known in the art (see, e.g. Sambrook and Russell, 2001, supra). The transcriptional regulatory sequences typically include a heterologous enhancer or promoter that is recognised by the host. The selection of an appropriate promoter depends upon the host, but promoters such as the trp, lac and phage promoters, tRNA promoters and glycolytic enzyme promoters are known and available (see, e.g. Sambrook and Russell, 2001, supra). Expression vectors include the replication system and transcriptional and translational regulatory sequences together with the insertion site for the polypeptide encoding segment can be employed. Examples of workable combinations of cell lines and expression vectors are described in Sambrook and Russell (2001, supra) and in Metzger et al. (1988) Nature 334: 31-36. For example, suitable expression vectors can be expressed in, yeast, e.g. S. cerevisiae, e.g., insect cells, e.g., Sf9 cells, mammalian cells, e.g., CHO cells and bacterial cells, e.g., E. coli. The host cells may thus be prokaryotic or eukarotic host cells. A host cell may be a host cell that is suitable for culture in liquid or on solid media. A host cell is preferably used in a method for producing a polypeptide of the invention as defined above or in a method for identification of a substance as defined herein. Said method may comprise the step of culturing a host cell under conditions conducive to the expression of said polypeptide. Optionally the method may comprise recovery of said polypeptide. A polypeptide may e.g. be recovered from the culture medium by standard protein purification techniques, including a variety of chromatography methods known in the art per se.

[0128] Alternatively, a host cell is a cell that is part of a multi cellular organism such as a transgenic plant or animal, preferably a non-human animal. A transgenic plant comprises in at least a part of its cells a vector as defined above. Methods for generating transgenic plants are e.g. described in U.S. Pat. No. 6,359,196 and in the references cited therein. Such transgenic plant or animal may be used in a method for producing a polypeptide of the invention as defined above and/or in a method for identification of a substance both as defined herein. For transgenic plant, a preferred method comprises the step of recovering a part of a transgenic plant comprising in its cells the vector or a part of a descendant of such transgenic plant, whereby the plant part contains said polypeptide, and, optionally recovery of said polypeptide from the plant part. Such methods are also described in U.S. Pat. No. 6,359,196 and in the references cited therein. Similarly, the transgenic animal comprises in its somatic and germ cells a vector as defined above. The transgenic animal preferably is a non-human animal. Methods for generating transgenic animals are e.g. described in WO 01/57079 and in the references cited therein. Such transgenic animals may be used in a method for producing a polypeptide of the invention as defined above, the method comprising the step of recovering a body fluid from a transgenic animal comprising the vector or a female descendant thereof, wherein the body fluid contains said polypeptide, and, optionally recovery of said polypeptide from said body fluid. Such methods are also described in WO 01/57079 and in the references cited therein. The body fluid containing the polypeptide preferably is blood or more preferably milk

[0129] Another method for preparing a polypeptide is to employ an in vitro transcription/translation system. DNA encoding a polypeptide is cloned into an expression vector as described supra. The expression vector is then transcribed and translated in vitro. The translation product can be used directly or first purified. A polypeptide resulting from in vitro translation typically do not contain the post-translation modifications present on polypeptides synthesised in vivo, although due to the inherent presence of microsomes some post-translational modification may occur. Methods for synthesis of polypeptides by in vitro translation are described by, for example, Berger & Kimmel, Methods in Enzymology, Volume 152, Guide to Molecular Cloning Techniques, Academic Press, Inc., San Diego, Calif., 1987.

### Gene Therapy

[0130] Some aspects of the invention concern the use of a nucleic acid construct or expression vector comprising a nucleotide sequence as defined above, wherein the vector is a vector that is suitable for gene therapy. Vectors that are suitable for gene therapy are described in Anderson 1998, Nature 392: 25-30; Walther and Stein, 2000, Drugs 60: 249-71; Kay et al., 2001, Nat. Med. 7: 33-40; Russell, 2000, J. Gen. Virol. 81: 2573-604; Amado and Chen, 1999, Science 285: 674-6; Federico, 1999, Curr. Opin. Biotechnol. 10: 448-53; Vigna and Naldini, 2000, J. Gene Med. 2: 308-16; Marin et al., 1997, Mol. Med. Today 3: 396-403; Peng and Russell, 1999, Cum Opin. Biotechnol. 10: 454-7; Sommerfelt, 1999, J. Gen. Virol. 80: 3049-64; Reiser, 2000, Gene Ther. 7: 910-3; and references cited therein.

[0131] Particularly suitable gene therapy vectors include Adenoviral and Adeno-associated virus (AAV) vectors. These vectors infect a wide number of dividing and non-dividing cell types including neuronal cells. In addition adenoviral vectors are capable of high levels of transgene expression. However, because of the episomal nature of the adenoviral and AAV vectors after cell entry, these viral vectors are most suited for therapeutic applications requiring only transient expression of the transgene (Russell, 2000, J. Gen. Virol. 81: 2573-2604; Goncalves, 2005, Virol J. 2(1):43) as indicated above. Preferred adenoviral vectors are modified to reduce the host response as reviewed by Russell (2000, supra). Method for neuronal gene therapy using AAV vectors are described by Wang et al., 2005, J Gene Med. March 9 (Epub ahead of print), Mandel et al., 2004, Curr Opin Mol Ther. 6(5):482-90, and Martin et al., 2004, Eye 18(11):1049-55. For gene transfer into a human and/or tumour and/or mammary cell, a AAV serotype 2 is an effective vector and therefore a preferred AAV serotype.

[0132] A preferred retroviral vector for application in the present invention is a lentiviral based expression construct. Lentiviral vectors have the unique ability to infect non-dividing cells (Amado and Chen, 1999 Science 285: 674-6). Methods for the construction and use of lentiviral based expression constructs are described in U.S. Pat. Nos. 6,165,782, 6,207,455, 6,218,181, 6,277,633 and 6,323,031 and in Federico (1999, Curr Opin Biotechnol 10: 448-53) and Vigna et al. (2000, J Gene Med 2000; 2: 308-16).

[0133] Generally, gene therapy vectors will be as the expression vectors described above in the sense that they comprise a nucleotide sequence encoding a polypeptide of the invention to be expressed, whereby said nucleotide sequence is operably linked to the appropriate regulatory sequences as indicated above. Such regulatory sequence will at least comprise a promoter sequence. Suitable promoters for expression of a nucleotide sequence encoding said polypeptide from gene therapy vectors include e.g. cytomegalovirus (CMV) intermediate early promoter, viral long terminal repeat promoters (LTRs), such as those from murine moloney leukaemia virus (MMLV) rous sarcoma virus, or HTLV-1, the simian virus 40 (SV 40) early promoter and the herpes simplex virus thymidine kinase promoter. Suitable promoters are described below.

[0134] Several inducible promoter systems have been described that may be induced by the administration of small organic or inorganic compounds. Such inducible promoters include those controlled by heavy metals, such as the metallothionine promoter (Brinster et al. 1982 Nature 296: 39-42; Mayo et al. 1982 Cell 29: 99-108), RU-486 (a progesterone antagonist) (Wang et al. 1994 Proc. Natl. Acad. Sci. USA 91: 8180-8184), steroids (Mader and White, 1993 Proc. Natl. Acad. Sci. USA 90: 5603-5607), tetracycline (Gossen and Bujard 1992 Proc. Natl. Acad. Sci. USA 89: 5547-5551; U.S. Pat. No. 5,464,758; Furth et al. 1994 Proc. Natl. Acad. Sci. USA 91: 9302-9306; Howe et al. 1995 J. Biol. Chem. 270: 14168-14174; Resnitzky et al. 1994 Mol. Cell. Biol. 14: 1669-1679; Shockett et al. 1995 Proc. Natl. Acad. Sci. USA 92: 6522-6526) and the tTAER system that is based on the multi-chimeric transactivator composed of a tetR polypeptide, as activation domain of VP16, and a ligand binding domain of an estrogen receptor (Yee et al., 2002, U.S. Pat. No. 6,432,705).

[0135] Suitable promoters for nucleotide sequences encoding small RNAs for knock down of specific genes by RNA interference (see below) include, in addition to the above mentioned polymerase II promoters, polymerase III promoters. The RNA polymerase III (pol III) is responsible for the synthesis of a large variety of small nuclear and cytoplasmic non-coding RNAs including 5S, U6, adenovirus VA1, Vault, telomerase RNA, and tRNAs. The promoter structures of a large number of genes encoding these RNAs have been determined and it has been found that RNA pol III promoters fall into three types of structures (for a review see Geiduschek and Tocchini-Valentini, 1988 Annu. Rev. Biochem. 57: 873-914; Willis, 1993 Eur. J. Biochem. 212: 1-11; Hernandez, 2001, J. Biol. Chem. 276: 26733-36). Particularly suitable for expression of siRNAs are the type 3 of the RNA pol III promoters, whereby transcription is driven by cis-acting elements found only in the 51-flanking region, i.e. upstream of the transcription start site. Upstream sequence elements include a traditional TATA box (Mattaj et al., 1988 Cell 55, 435-442), proximal sequence element and a distal sequence element (DSE; Gupta and Reddy, 1991 Nucleic Acids Res. 19, 2073-2075). Examples of genes under the control of the type 3 pol III promoter are U6 small nuclear RNA (U6 snRNA), 7SK, Y, MRP, H1 and telomerase RNA genes (see e.g. Myslinski et al., 2001, Nucl. Acids Res. 21: 2502-09).

[0136] The gene therapy vector may optionally comprise a second or one or more further nucleotide sequence coding for a second or further polypeptide. The second or further polypeptide may be a (selectable) marker polypeptide that allows for the identification, selection and/or screening for cells containing the expression construct. Suitable marker proteins for this purpose are e.g. the fluorescent protein GFP, and the selectable marker genes HSV thymidine kinase (for selection on HAT medium), bacterial hygromycin B phosphotransferase (for selection on hygromycin B), Tn5 aminoglycoside phosphotransferase (for selection on G418), and dihydrofolate reductase (DHFR) (for selection on methotrexate), CD20, the low affinity nerve growth factor gene. Sources for obtaining these marker genes and methods for their use are provided in Sambrook and Russel (2001) “Molecular Cloning: A Laboratory Manual (3^{rd} edition), Cold Spring Harbor Laboratory, Cold Spring Harbor Laboratory Press, New York.

[0137] Alternatively, the second or further nucleotide sequence may encode a polypeptide that provides for fail-safe mechanism that allows to cure a subject from the transgenic cells, if deemed necessary. Such a nucleotide sequence, often referred to as a suicide gene, encodes a polypeptide that is capable of converting a pro drug into a toxic substance that is capable of killing the transgenic cells in which said polypeptide is expressed. Suitable examples of such suicide genes include e.g. the E. coli cytosine deaminase gene or one of the thymidine kinase genes from Herpes Simplex Virus, Cytomegalovirus and Varicella-Zoster virus, in which case ganciclovir may be used as prodrug to kill the IL-10 transgenic cells in the subject (see e.g. Clair et al., 1987, Antimicrob. Agents Chemother. 31: 844-849).

[0138] A gene therapy vector is preferably formulated in a pharmaceutical composition comprising a suitable pharmaceutical carrier as defined below.

### RNA Interference

[0139] For knock down of expression of a specific polypeptide of the invention as identified in the section entitled “inhibitor”, a gene therapy vector or other expression construct is used for the expression of a desired nucleotide sequence that preferably encodes an RNAi agent, i.e. an RNA molecule that is capable of RNA interference or that is part of an RNA molecule that is capable of RNA interference. Such RNA molecules are referred to as siRNA (short interfering RNA, including e.g. a short hairpin RNA). Alternatively, the siRNA molecules may directly, e.g. in a pharmaceutical composition that is administered within or in the neighbourhood of a human and/or tumour and/or mammary cell.

[0140] A desired nucleotide sequence comprises an antisense code DNA coding for the antisense RNA directed against a region of the target gene mRNA, and/or a sense code DNA coding for the sense RNA directed against the same region of the target gene mRNA. In a DNA construct of the invention, the antisense and sense code DNAs are operably linked to one or more promoters as herein defined above that are capable of expressing the antisense and sense RNAs, respectively. “siRNA” means a small interfering RNA that is a short-length double-stranded RNA that are not toxic in mammalian cells (Elbashir et al., 2001, Nature 411: 494-98; Caplen et al., 2001, Proc. Natl. Acad. Sci. USA 98: 9742-47). The length is not necessarily limited to 21 to 23 nucleotides. There is no particular limitation in the length of siRNA as long as it does not show toxicity. “siRNAs” can be, e.g. at least 15, 18 or 21 nucleotides and up to 25, 30, 35 or 49 nucleotides long. Alternatively, the double-stranded RNA portion of a final transcription product of siRNA to be expressed can be, e.g. at least 15, 18 or 21 nucleotides and up to 25, 30, 35 or 49 nucleotides long.

[0141] “Antisense RNA” is an RNA strand having a sequence complementary to a target gene mRNA, and thought to induce RNAi by binding to the target gene mRNA. “Sense RNA” has a sequence complementary to the antisense RNA, and annealed to its complementary antisense RNA to form siRNA. The term “target gene” in this context refers to a gene whose expression is to be silenced due to siRNA to be expressed by the present system, and can be arbitrarily selected. As this target gene, for example, genes whose sequences are known but whose functions remain to be elucidated, and genes whose expressions are thought to be causative of diseases are preferably selected. A target gene may be one whose genome sequence has not been fully elucidated, as long as a partial sequence of mRNA of the gene having at least 15 nucleotides or more, which is a length capable of binding to one of the strands (antisense RNA strand) of siRNA, has been determined. Therefore, genes, expressed sequence tags (ESTs) and portions of mRNA, of which some sequence (preferably at least 15 nucleotides) has been elucidated, may be selected as the “target gene” even if their full length sequences have not been determined.

[0142] The double-stranded RNA portions of siRNAs in which two RNA strands pair up are not limited to the completely paired ones, and may contain non pairing portions due to mismatch (the corresponding nucleotides are not complementary), bulge (lacking in the corresponding complementary nucleotide on one strand), and the like. Non pairing portions can be contained to the extent that they do not interfere with siRNA formation. The “bulge” used herein preferably comprise 1 to 2 non pairing nucleotides, and the double-stranded RNA region of siRNAs in which two RNA strands pair up contains preferably 1 to 7, more preferably 1 to 5 bulges. In addition, the “mismatch” used herein is contained in the double-stranded RNA region of siRNAs in which two RNA strands pair up, preferably 1 to 7, more preferably 1 to 5, in number. In a preferable mismatch, one of the nucleotides is guanine, and the other is uracil. Such a mismatch is due to a mutation from C to T, G to A, or mixtures thereof in DNA coding for sense RNA, but not particularly limited to them. Furthermore, in the present invention, the double-stranded RNA region of siRNAs in which two RNA strands pair up may contain both bulge and mismatched, which sum up to, preferably 1 to 7, more preferably 1 to 5 in number. Such non pairing portions (mismatches or bulges, etc.) can suppress the below-described recombination between antisense and sense code DNAs and make the siRNA expression system as described below stable. Furthermore, although it is difficult to sequence stem loop DNA containing no non pairing portion in the double-stranded RNA region of siRNAs in which two RNA strands pair up, the sequencing is enabled by introducing mismatches or bulges as described above. Moreover, siRNAs containing mismatches or bulges in the pairing double-stranded RNA region have the advantage of being stable in E. coli or animal cells.

[0143] The terminal structure of siRNA may be either blunt or cohesive (overhanging) as long as siRNA enables to silence the target gene expression due to its RNAi effect. The cohesive (overhanging) end structure is not limited only to the 3′ overhang, and the 5′ overhanging structure may be included as long as it is capable of inducing the RNAi effect. In addition, the number of overhanging nucleotide is not limited to the already reported 2 or 3, but can be any numbers as long as the overhang is capable of inducing the RNAi effect. For example, the overhang consists of 1 to 8, preferably 2 to 4 nucleotides. Herein, the total length of siRNA having cohesive end structure is expressed as the sum of the length of the paired double-stranded portion and that of a pair comprising overhanging single-strands at both ends. For example, in the case of 19 by double-stranded RNA portion with 4 nucleotide overhangs at both ends, the total length is expressed as 23 bp. Furthermore, since this overhanging sequence has low specificity to a target gene, it is not necessarily complementary (antisense) or identical (sense) to the target gene sequence. Furthermore, as long as siRNA is able to maintain its gene silencing effect on the target gene, siRNA may contain a low molecular weight RNA (which may be a natural RNA molecule such as tRNA, rRNA or viral RNA, or an artificial RNA molecule), for example, in the overhanging portion at its one end.

[0144] In addition, the terminal structure of the “siRNA” is necessarily the cut off structure at both ends as described above, and may have a stem-loop structure in which ends of one side of double-stranded RNA are connected by a linker RNA (a “shRNA”). The length of the double-stranded RNA region (stem-loop portion) can be, e.g. at least 15, 18 or 21 nucleotides and up to 25, 30, 35 or 49 nucleotides long. Alternatively, the length of the double-stranded RNA region that is a final transcription product of siRNAs to be expressed is, e.g. at least 15, 18 or 21 nucleotides and up to 25, 30, 35 or 49 nucleotides long. Furthermore, there is no particular limitation in the length of the linker as long as it has a length so as not to hinder the pairing of the stem portion. For example, for stable pairing of the stem portion and suppression of the recombination between DNAs coding for the portion, the linker portion may have a clover-leaf tRNA structure. Even though the linker has a length that hinders pairing of the stem portion, it is possible, for example, to construct the linker portion to include introns so that the introns are excised during processing of precursor RNA into mature RNA, thereby allowing pairing of the stem portion. In the case of a stem-loop siRNA, either end (head or tail) of RNA with no loop structure may have a low molecular weight RNA. As described above, this low molecular weight RNA may be a natural RNA molecule such as tRNA, rRNA, snRNA or viral RNA, or an artificial RNA molecule.

[0145] To express antisense and sense RNAs from the antisense and sense code DNAs respectively, a DNA construct of the present invention comprise a promoter as defined above. The number and the location of the promoter in the construct can in principle be arbitrarily selected as long as it is capable of expressing antisense and sense code DNAs. As a simple example of a DNA construct of the invention, a tandem expression system can be formed, in which a promoter is located upstream of both antisense and sense code DNAs. This tandem expression system is capable of producing siRNAs having the aforementioned cut off structure on both ends. In the stem-loop siRNA expression system (stem expression system), antisense and sense code DNAs are arranged in the opposite direction, and these DNAs are connected via a linker DNA to construct a unit. A promoter is linked to one side of this unit to construct a stem-loop siRNA expression system. Herein, there is no particular limitation in the length and sequence of the linker DNA, which may have any length and sequence as long as its sequence is not the termination sequence, and its length and sequence do not hinder the stem portion pairing during the mature RNA production as described above. As an example, DNA coding for the above-mentioned tRNA and such can be used as a linker DNA.

[0146] In both cases of tandem and stem-loop expression systems, the 5′ end may be have a sequence capable of promoting the transcription from the promoter. More specifically, in the case of tandem siRNA, the efficiency of siRNA production may be improved by adding a sequence capable of promoting the transcription from the promoters at the 5′ ends of antisense and sense code DNAs. In the case of stem-loop siRNA, such a sequence can be added at the 5′ end of the above-described unit. A transcript from such a sequence may be used in a state of being attached to siRNA as long as the target gene silencing by siRNA is not hindered. If this state hinders the gene silencing, it is preferable to perform trimming of the transcript using a trimming means (for example, ribozyme as are known in the art). It will be clear to the skilled person that the antisense and sense RNAs may be expressed in the same vector or in different vectors. To avoid the addition of excess sequences downstream of the sense and antisense RNAs, it is preferred to place a terminator of transcription at the 3′ ends of the respective strands (strands coding for antisense and sense RNAs). The terminator may be a sequence of four or more consecutive adenine (A) nucleotides.

### Antibodies

[0147] Some aspects of the invention concern the use of an antibody or antibody-fragment that specifically binds to a polypeptide of the invention as defined above in the section entitled “inhibitor” and that is able to inhibit an activity of said polypeptide. Said antibody is designated as an inhibiting-antibody. Methods for generating antibodies or antibody-fragments that specifically bind to a given polypeptide are described in e.g. Harlow and Lane (1988, Antibodies: A Laboratory Manual, Cold Spring Harbor Laboratory Press, Cold Spring Harbor, N.Y.) and WO 91/19818; WO 91/18989; WO 92/01047; WO 92/06204; WO 92/18619; and U.S. Pat. No. 6,420,113 and references cited therein. The term “specific binding,” as used herein, includes both low and high affinity specific binding. Specific binding can be exhibited, e.g., by a low affinity antibody or antibody-fragment having a Kd of at least about 10⁻⁴ M. Specific binding also can be exhibited by a high affinity antibody or antibody-fragment, for example, an antibody or antibody-fragment having a Kd of at least about of 10⁻⁷ M, at least about 10⁻⁸ M, at least about 10⁻⁹ M, at least about 10⁻¹⁰ M, or can have a Kd of at least about 10⁻¹¹ M or 10⁻¹² M or greater.

### Peptidomimetics

[0148] Peptide-like molecules (referred to as peptidomimetics) or non-peptide molecules that specifically bind to a polypeptide of the invention as defined above in the section entitled “inhibitor” or to its receptor polypeptide and that may be applied in any of the methods of the invention as defined herein (for example for altering the activity or steady state level of a polypeptide of the invention) as an antagonist or inhibitor of a polypeptide of the invention and they may be identified using methods known in the art per se, as e.g. described in detail in U.S. Pat. No. 6,180,084 which incorporated herein by reference. Such methods include e.g. screening libraries of peptidomimetics, peptides, DNA or cDNA expression libraries, combinatorial chemistry and, particularly useful, phage display libraries. These libraries may be screened for an antagonist of a polypeptide by contacting the libraries with a substantially purified polypeptide of the invention, a fragment thereof or a structural analogue thereof.

### Pharmaceutical Compositions

[0149] The invention further relates to a pharmaceutical preparation comprising as active ingredient an inhibitor as identified herein wherein said inhibitor is selected from the group consisting of: a polypeptide, a nucleic acid, a nucleic acid construct, a gene therapy vector and an antibody. All these ingredients were already defined herein. Said preparation or composition preferably comprises at least one pharmaceutically acceptable carrier in addition to an active ingredient.

[0150] In some methods, a polypeptide or antibody of the invention as purified from mammalian, insect or microbial cell cultures, from milk of transgenic mammals or other source is administered in purified form together with a pharmaceutical carrier as a pharmaceutical composition. Methods of producing pharmaceutical compositions comprising polypeptides are described in U.S. Pat. No.'s 5,789,543 and 6,207,718. The preferred form depends on the intended mode of administration and therapeutic application.

[0151] A pharmaceutical carrier can be any compatible, non-toxic substance suitable to deliver a polypeptide, antibody or gene therapy vector to a patient. Sterile water, alcohol, fats, waxes, and inert solids may be used as a carrier. A pharmaceutically acceptable adjuvant, buffering agent, dispersing agent, and the like, may also be incorporated into a pharmaceutical composition.

[0152] The concentration of a polypeptide or antibody of the invention in a pharmaceutical composition can vary widely, i.e., from less than about 0.1% by weight, usually being at least about 1% by weight to as much as 20% by weight or more.

[0153] For oral administration, an active ingredient can be administered in solid dosage forms, such as capsules, tablets, and powders, or in liquid dosage forms, such as elixirs, syrups, and suspensions. An active component or ingredient can be encapsulated in gelatin capsules together with an inactive ingredient and a powdered carrier, such as glucose, lactose, sucrose, mannitol, starch, cellulose or cellulose derivatives, magnesium stearate, stearic acid, sodium saccharin, talcum, magnesium carbonate and the like. Examples of additional inactive ingredients that may be added to provide desirable colour, taste, stability, buffering capacity, dispersion or other known desirable features are red iron oxide, silica gel, sodium lauryl sulfate, titanium dioxide, edible white ink and the like. Similar diluents can be used to make compressed tablets. Both tablets and capsules can be manufactured as sustained release products to provide for continuous release of medication over a period of hours. Compressed tablets can be sugar coated or film coated to mask any unpleasant taste and protect the tablet from the atmosphere, or enteric-coated for selective disintegration in the gastrointestinal tract. Liquid dosage forms for oral administration can contain colouring and flavouring to increase patient acceptance.

[0154] A polypeptide, antibody or nucleic acid construct or gene therapy vector is preferably administered parentally or systemically. A polypeptide, antibody, nucleic acid construct or vector for preparations must be sterile. Sterilisation is readily accomplished by filtration through sterile filtration membranes, prior to or following lyophilisation and reconstitution. One preferred route of administration is systemic, more preferably orally. Another preferred route is a parental route for administration of A polypeptide, antibody, nucleic acid construct or vector is in accord with known methods, e.g. injection or infusion by subcutaneous, intravenous, intraperitoneal, intramuscular, intraarterial, intralesional, intracranial, intrathecal, transdermal, nasal, buccal, rectal, or vaginal routes. More preferably, the route for administration is intravenous or subcutaneous. A polypeptide, antibody nucleic acid construct or vector is administered continuously by infusion or by bolus injection. A typical composition for intravenous infusion could be made up to contain 10 to 50 ml of sterile 0.9% NaCl or 5% glucose optionally supplemented with a 20% albumin solution and 1 to 50 μg of the polypeptide, antibody nucleic acid construct or vector. A typical pharmaceutical composition for intramuscular injection would be made up to contain, for example, 1-10 ml of sterile buffered water and 1 to 100 μg of a polypeptide, antibody, nucleic acid construct or vector of the invention. Methods for preparing parenterally administrable compositions are well known in the art and described in more detail in various sources, including, for example, Remington's Pharmaceutical Science (15th ed., Mack Publishing, Easton, Pa., 1980) (incorporated by reference in its entirety for all purposes).

[0155] For therapeutic applications, a pharmaceutical composition is preferably administered to a cancer patient as earlier defined herein in an amount sufficient to reduce the severity of symptoms and/or prevent or arrest further development of symptoms. An amount adequate to accomplish this is defined as a “therapeutically-” or “prophylactically-effective dose”. Such effective dosages will depend on the severity of the condition and on the general state of the patient's health. In general, a therapeutically- or prophylactically-effective dose preferably is a dose, which is sufficient to reverse the symptoms, i.e. to prevent, delay and/or treat metastasis as earlier defined herein.

[0156] In the present methods, a polypeptide or antibody is usually administered at a dosage of about 1 μg/kg subject body weight or more per week to a subject. Often dosages are greater than 10 μg/kg per week. Dosage regimes can range from 10 μg/kg per week to at least 1 mg/kg per week. Typically dosage regimes are 10 μg/kg per week, 20 μg/kg per week, 30 μg/kg per week, 40 μg/kg week, 60 μg/kg week, 80 μg/kg per week and 120 μg/kg per week. In preferred regimes 10 μg/kg, 20 μg/kg or 40 μg/kg is administered once, twice or three times weekly. Treatment is preferably administered by parenteral route.

[0157] In this document and in its claims, the verb “to comprise” and its conjugations is used in its non-limiting sense to mean that items following the word are included, but items not specifically mentioned are not excluded. In addition the verb “to consist” may be replaced by “to consist essentially of” meaning that a polypeptide or a nucleic acid construct or an antibody or a composition as defined herein may comprise additional component(s) than the ones specifically identified, said additional component(s) not altering the unique characteristic of the invention. In addition, reference to an element by the indefinite article “a” or “an” does not exclude the possibility that more than one of the element is present, unless the context clearly requires that there be one and only one of the elements. The indefinite article “a” or “an” thus usually means “at least one”.

[0158] Each embodiment as identified herein may be combined together unless otherwise indicated. All patent and literature references cited in the present specification are hereby incorporated by reference in their entirety.

[0159] The invention is further illustrated by the following examples which should not be construed for limiting the scope of the present invention.

### DESCRIPTION OF THE FIGURES

[0160] FIG. 1. Gene-expression profiling of a metastasis model system identifies Fra-1 as a candidate metastasis gene. A. Phase contrast micrographs of RK3E and RIE rat epithelial cells expressing ligand-activated TrkB (‘RK3E^{TB}’ and ‘RIE^{TB}’ cells) or empty vector. Images were taken at 40× magnification B. Microarray gene-expression analysis of RK3E^{TB} and RIE^{TB} cells. The top 10 genes that are up- or down-regulated in both cell systems are shown in a heat map. C. Fra-1 expression levels measured by quantitative RT-PCR (upper panel) and western blotting (lower panel; n for PCR=3, error bars: S.D. Asterisk, different from control with P<0.01 based on a one-sided Student's t test). α-tubulin serves as loading control. D. Gel shift analysis measuring AP-1 DNA-binding activity. Supershift with Fra-1 antibody was performed to determine the relative contribution of Fra-1 to the total DNA-binding activity (empty arrows indicate supershifted AP-1 complex).

[0161] FIG. 2. Fra-1 is required for EMT of TrkB-expressing tumor cells. A. Fra-1 and E-cadherin expression levels measured by western blotting in RK3E^{TB} cells expressing independent shRNAs targeting Fra-1 as indicated. α-tubulin serves as loading control. B. Phase contrast micrographs showing the effects of Fra-1 depletion on cell morphology. Images were taken at 40× magnification C. Detection by immunofluorescence of Fra-1 and E-cadherin in cells as indicated. Phalloidin staining on cells plated in parallel is included to visualize the cytoskeleton. Parental RK3E cells are included as reference. D. Migration (upper panel) and invasion (lower panel) capacities as a function of Fra-1 depletion (n=3, error bars: S.D. Asterisk, different from control clones with P<0.001 based on a one-way ANOVA followed by LSD test). E. In vitro proliferation curve of RK3E^{TB} tumor cells, as a function of Fra-1 depletion (n=3, error bars: S.D.).

[0162] FIG. 3. Suppression of Fra-1 abrogates metastatic potential of TrkB-expressing primary tumors. A. In vivo growth curve of tumors formed by RK3E^{TB} tumor cells injected subcutaneously into nude mice, as a function of Fra-1 depletion (n=6, error bars: S.E.). B. Haematoxylin-Eosin staining of histological sections of subcutaneously expanding RK3E^{TB} tumors, as a function of Fra-1 depletion (scale bar: 100 μm; T: Tumor, S: skin). C. Macroscopic quantification of pulmonary metastases in mice carrying subcutaneous control or Fra-1-depleted RK3E^{TB} tumors, as analyzed at 3 weeks post-inoculation (microscopic quantification in Suppl. FIG. 2A). D. Representative images of macroscopic pulmonary metastases (left panels) and haematoxylin-eosin staining of histological lung sections (right panels, scale bar: 200 μm; M: metastasis) from mice described in C.

[0163] FIG. 4. Suppression of Fra-1 reverses EMT and blocks pulmonary colonization of human breast cancer cells. A. Expression levels of epithelial proteins as indicated in human MDA-MB-231 breast cancer cells as a function of Fra-1 depletion. α-tubulin serves as loading control. B. Detection by immunofluorescence of E-cadherin (upper panel) and cytoskeletal actin (by phalloidin staining; lower panel) of control and Fra-1-silenced MDA-MB-231 cells. C. In vitro proliferation curve of control and Fra-1-silenced MDA-MB-231 cells (n=3, error bars: S.D.). D. Images of the lungs (upper panel) and haematoxylin-eosin stained sections of the lungs (lower panel, scale bar: 100 μm; T: Tumor) of mice that were injected intravenously with 1.10⁶ MDA-MB-231 cells expressing independent Fra-1 shRNAs as indicated, photographed at 3 months after inoculation. E. Macroscopic quantification of the metastases formed by MDA-MB-231 cells described in D (n=5 lungs, error bars: S.D. Asterisk, different from control clones with P<0.001 based on a one-way ANOVA followed by LSD test). F. Immunohistochemical analysis of Fra-1 and Ki67 expression in lung tumors developing in mice inoculated intravenously with control or Fra-1-depleted MDA-MB-231 cells (inserts, higher magnification).

[0164] FIG. 5. Suppression of Fra-1 blocks metastasis from orthotopic human breast tumors. A. Quantification of the fluorescence in the lungs of nude mice inoculated intravenously with 1.10⁶ GFP-labeled LM2 cells expressing independent Fra-1 shRNAs as indicated, 35 days after inoculation (n=5 lungs, error bars: S.D. Asterisk, different from control with P<0.001 based on a one-way ANOVA followed by LSD test). B. Fluorescence imaging of the lungs of mice described in A. C. Quantification of the metastatic nodules in the lungs of nude mice injected in the 4^{th} mammary fat pad with GFP-labeled LM2 cells expressing independent Fra-1 sh-RNAs, 6 weeks after surgical removal of the primary tumor (n=10). D. Fluorescence imaging of the lungs of mice described in C.

[0165] FIG. 6. A Fra1-associated gene-expression profile accurately predicts clinical outcome of human breast cancer. A. Outline of the procedure used to generate a gene-expression profile that is associated with Fra-1 function and based on the Fra-1-dependent transcriptome in LM2 cells. B. Distant Metastasis-Free Survival (DMFS) of patients from the NKI295 data set (left panel) and Breast Cancer Specific Survival (BCSS) of patients from the Affymetrix validation set (Right panel) that were classified as having a ‘poor’ prognosis (blue line) or ‘good’ prognosis (black line) using the Fra-1 classifier. (Displayed p-values are based on the log-rank test).

[0166] FIG. 7. Fra-1 depletion in RK3E^{TB} cells reverts morphological transformation. A. Fra-1 expression levels in polyclonal pools of RK3E^{TB} cells containing empty vector or independent shRNAs targeting Fra-1, as indicated. B. Phase contrast micrographs of the cells described in B. C. Restoration of Fra-1 expression in sh-Fra1 (1) expressing RK3E^{TB} cells, resulting in morphological transformation. D. Phase contrast micrographs of the cells described in C. In both A. and C., the panels were taken from a single blot and α-tubulin serves as loading control. Cells were photographed at 40× magnification.

[0167] FIG. 8. Fra-1 is essential for TrkB-driven metastasis A. Microscopic quantification of pulmonary metastases disseminated from RK3E^{TB} tumors, as a function of Fra-1 depletion. The total number of metastases in 8 independent sections per mouse is indicated, representative of 3 independent experiments (asterisk, see Suppl. FIG. 2e). B. Haematoxylin-Eosin staining of a histological section of the lungs of a mouse that received a subcutaneous inoculation with Fra-1-depleted RK3E^{TB} tumor cells, displaying a micrometastasis (arrowhead) that failed to extravasate from pulmonary vessels (scale bar: 100 μm).

[0168] FIG. 9. Fra-1 is commonly overexpressed in human breast cancer cell lines. Western-blot analysis of Fra-1 expression in human breast cancer cell lines. β-actin serves as loading control.

[0169] FIG. 10. Fra-1 is required for lung metastasis of human breast cancer cells. A. Flow-cytometric analysis of GFP signal intensity in control and Fra-1-silenced LM2 cells prior to in vivo inoculation. B. Quantification of the fluorescence in the lungs of the mice inoculated intravenously with 1.10⁵ GFP-labeled LM2 cells expressing independent Fra-1 shRNAs as indicated, 35 days after inoculation (n=5 lungs, error bars: S.D. Asterisk, different from control with P<0.001 based on a one-way ANOVA followed by LSD test). C. Representative immunofluorescence imaging of the lungs of mice described in B. D. Expression levels of epithelial proteins in LM2 cells as a function of Fra-1 depletion. E. Weight of the orthotopic LM2 tumors upon surgical removal after one month of growth, as a function of Fra-1 depletion.

[0170] FIG. 11. Identification of Fra-1-regulated genes essential for lung metastasis formation. A. Quantification of the fluorescence in the lungs of the mice inoculated intravenously with 1.10⁵ GFP-labelled LM2 cells expressing independent shRNAs directed against the Fra-1-regulated genes as indicated, 5 weeks after inoculation (n=3 lungs, error bars: S.D. Asterisk, different from control for the 2 independent sh-RNAs with P<0.05 based on an unpaired one-sided t test). B. Expression levels of the Fra-1-regulated genes measured by quantitative RT-PCR in the LM2 cells injected into mice. C. Representative immunofluorescence imaging of the lungs of mice described in A.

### EXAMPLES

[0171] All references cited herein are incorporated by reference.

### Gene Expression Profiling of a Metastasis Model System Identifies Fra-1 as a Candidate Metastasis Gene

[0172] We performed microarray gene-expression profiling on both RIE and RK3E cells ectopically expressing TrkB and BDNF (hereafter RIE^{TB} or RK3E^{TB} cells; FIG. 1A). Commonly regulated outliers were considered potential metastasis promoters or inhibitors (the raw data of the microarray analyses are available at http://www.ebi.ac.uk/microarray-as/aer/#ae-main[0], accession E-NCMF-21). Among several other potentially interesting outliers was FOSL1 (FIG. 1B). Confirming our microarray expression data, Fra-1 was upregulated to up to >50-fold by activated TrkB at both the transcriptional and protein levels (FIG. 1C). Gel shift experiments revealed that this caused Fra-1 to become a major component of AP-1 DNA-binding complexes, also in both cell systems (FIG. 1D). Fra-1 upregulation in this setting is most probably due to Ras activation, acting as a downstream effector of TrkB signaling (Carter et al., 1995).

### Suppression of Fra-1 Reverses EMT and Abrogates Metastatic Potential of TrkB-Expressing Primary Tumors

[0173] To address the functional relevance of Fra-1 in oncogenic transformation and metastasis, we depleted it from RK3E^{TB} cells using retroviral vectors encoding independent short-hairpin (sh) RNAs (sh-Fra-1(1) and (2)). Several clonal cell populations were established in which the Fra-1 protein levels were reduced back to those seen in parental cells (FIG. 2A and data not shown).

[0174] Analysis performed in vitro revealed that Fra-1 silencing completely reversed the induction by activated TrkB of a spindle-like cellular phenotype, and cells regained a typical epithelial ‘cobble-stone’ morphology with extensive cell-cell junctions and actin cytoskeleton reorganization (FIG. 1A, 2B, C). This was observed for cell clones expressing non-overlapping shRNAs, as well as in polyclonal sh-Fra-1 cell pools (Suppl. FIG. 1A, B). Furthermore, restoration of Fra-1 expression reverted the effect of Fra-1 silencing (Suppl. FIG. 1C, D), all strongly arguing against an RNAi off-target effect. These morphological rearrangements were highly reminiscent of a reversion of EMT. Supporting this notion, Fra-1 depletion fully restored expression and correct subcellular localization of E-cadherin (FIG. 2A, C). This was paralleled by a complete cancellation of both the migratory and invasive properties of RK3E^{TB} cells (FIG. 2D).

[0175] Importantly, in spite of these effects, Fra-1 depletion did not at all influence the proliferative activity of RK3E^{TB} cells in culture (FIG. 2E). Similarly, when inoculated subcutaneously into athymic nude mice, cells silenced for Fra-1 produced tumors that expanded as rapidly as control tumors, and with indistinguishable morphology (FIG. 3A, B). Next, we addressed whether Fra-1 corresponds to an important determinant of the metastatic potential of these tumor cells in xenograft experiments. All mice that had received control tumor cells developed macroscopically detectable lung metastases that had disseminated from the subcutaneous primary tumors (FIG. 3C, D). In striking contrast, none of the mice injected with Fra-1-silenced tumor cells displayed any visible metastases. Microscopic histological examination of the lungs confirmed the presence of metastatic lesions invading the lung parenchyma in all mice that had received control cells, whereas pulmonary metastases were virtually absent in the recipients of Fra-1-silenced tumor cells (FIG. 8A). In fact, in the lungs of 36 mice carrying Fra-1-depleted tumors, only two colonies were observed, comprising a few cells only that had failed to extravasate from the pulmonary vessels (FIG. 8B). These results demonstrate that, at least in the context of TrkB-driven rodent epithelial tumor cell metastasis, Fra-1 is dispensable for primary tumorigenesis, but is crucial for the ability of these tumors to produce distant metastases from primary tumors.

### Suppression of Fra-1 Reverses EMT and Blocks Pulmonary Colonization of Human Breast Cancer Cells

[0176] Fra-1 is frequently overexpressed in human solid tumors, including those derived from breast, colon, thyroid tissue and in mesothelioma, as well as in many cell lines derived from various human tumor types (reviewed in Milde-Langosch, 2005). In a microarray gene-expression analysis, a correlation was noted between Fra-1 expression levels and the in vitro invasive potential of human breast cancer cell lines (Zajchowski et al., 2001). Also exclusively in vitro, Fra-1 overexpression in weakly invasive breast tumor cells has been shown to increase their invasive potential, while silencing of Fra-1 in a highly invasive cell line decreased it (Belguise et al., 2005). Although these results raise the possibility for a role for Fra-1 in metastasis of human mammary carcinoma cells also in vivo, this has not yet been addressed.

[0177] To study any role of Fra-1 in the oncogenic and metastatic potential of human breast cancer cells in vivo, we depleted its RNA from MDA-MB-231 cells, which strongly overexpress Fra-1 (Belguise et al., 2005 and Suppl. FIG. 3), by lentiviral transduction of either of two non-overlapping shRNAs. Similar to what we had observed for the rodent cell system, silencing of Fra-1 in polyclonal cell populations led to a strong upregulation of E-cadherin expression, as well as other epithelial proteins (FIG. 4A). Concomitantly, silencing of Fra-1 caused E-cadherin to relocalize at the cell membrane (FIG. 4B, upper panel). Together, these results indicate that Fra-1 is required for downregulation of epithelial characteristics in both rodent tumor cells and human mammary carcinoma cells. Consistent with previous findings (Belguise et al., 2005; Vial et al., 2003), this was associated with extensive cytoskeletal reorganization (FIG. 4B, lower panel).

[0178] Importantly, similar to what we observed for the rodent cells, the proliferative potential of MDA-MB-231 cells was not at all affected by the silencing of Fra-1 (FIG. 4C). This is in contradiction with previous findings (Belguise et al., 2005) and may be explained by our use of stably integrated proviral shRNA as opposed to their use of transfected siRNA. To examine if, similar to the rodent cell system, Fra-1 has a crucial role in the capacity of human breast cancer cells to colonize the lungs, MDA-MB-231 cells were inoculated intravenously into athymic mice. Indeed, Fra-1 depletion caused a strong decrease in the tumor burden in the lungs (FIG. 4D, E). The rare pulmonary tumors of Fra-1-depleted MDA-MB-231 cells that did emerge expressed normal levels of Fra-1 and proliferated as fast as the colonies formed by control cells (FIG. 4F). Because we used polyclonal pools of Fra-1 depleted cells, these tumors most probably emerged from cells with incomplete silencing of Fra-1 (similar to what has previously been observed for Twist—Yang et al., 2004). These results indicate that depletion of Fra-1 from human breast cancer cells restores key epithelial characteristics and blocks their ability to colonize the lungs.

Suppression of Fra-1 Blocks Metastasis from Orthotopic Human Breast Tumors

[0179] As an independent measure, we inoculated intravenously 1.10⁶ GFP-labeled LM2 cells, an MDA-MB-231-derived cell line associated with a high proclivity to metastasize to the lungs (Minn et al., 2005). Flow cytometry just prior to injection showed that all cell lines expressed equal levels of GFP, irrespective of Fra-1 silencing (Suppl. FIG. 4A). Fluorescence imaging of the lungs revealed an almost 20,000-fold reduction in the tumor burden upon silencing of Fra-1 (FIG. 5A, B). A similarly strong suppression of metastasis by Fra-1 depletion was observed with inoculation of 1.10⁵ cells (Suppl. FIG. 4B, C). The reduction in lung colonization was dose-dependent, as illustrated by a correlation that was observed between Fra-1 knockdown levels and the colonizing capacity of these cells (with sh-Fra-1(2) performing best in both settings; compare FIG. 5A and FIG. 10B to FIG. 10D). Together, these results reveal a crucial role for Fra-1 in the capacity of human breast cancer cells to form experimental pulmonary metastases.

[0180] As intravenous inoculation bypasses the need for tumor cells to invade and intravasate, we next determined whether Fra-1 is required also for the full metastatic cascade. For this, we used an orthotopic model in which GFP-labeled LM2 cells were injected into the mammary fat pad of nude mice. Cells receiving the control plasmid developed primary tumors that metastasized to the lungs in most of the animals (FIG. 5C, D). By contrast, LM2 cells expressing shRNAs against Fra-1 developed tumors that grew more slowly (FIG. 10E) and were unable to develop detectable lung metastases (FIG. 5C, D). Again, the inhibition of lung-colonizing tumor activity was associated with upregulation of E-cadherin expression (FIG. 10D). Thus, together these results reveal a crucial role for Fra-1 in the capacity of human breast cancer cells to form pulmonary metastases from primary tumors. As we show that this block in metastasis is seen also for intravenously inoculated tumor cells, these data also indicate that Fra-1 fulfills an essential role in the late steps of the metastatic process.

### Fra-1 Expression and its Associated Gene-Expression Profile are Determinants of Breast Cancer Recurrence

[0181] Further supporting the crucial role of Fra-1 in the ability of human breast cancer cells to metastasize, we observed an association between Fra-1 mRNA expression levels in primary human breast carcinomas and the risk of developing distant site metastasis in the Affymetrix training set, a cohort of 509 breast cancer patients (p=0.03; log-rank test, see Methods). The fact that Fra-1 corresponds to a transcription factor raised the possibility that its associated transcriptome, too, is endowed with prognostic power regarding clinical outcome. In fact, it has been suggested that in a so-called data-driven approach for finding connections between gene-expression patterns and tumor behavior, the target genes of transcription factors often represent better biomarkers than the transcription factor itself, as they are expressed as a function of the activity—and not just expression—of the transcription factor (van 't Veer and Bernards, 2008).

[0182] To determine whether Fra-1 target gene expression levels correlate with breast cancer recurrence, we performed microarray gene-expression profiling of LM2 cells in which Fra-1 was silenced using shRNA. Probes that were significantly up- or down-regulated by both shRNAs (p<1.10⁻⁵) were selected (not shown). This set of Agilent probes was mapped to the corresponding Affymetrix probes. Probes showing prognostic value in the Affymetrix training set (509 patient cohort) were then used to generate the Fra-1 classifier, which contained 447 probes (FIG. 6A, and not shown).

[0183] The Fra-1 centroid classifier was validated independently on two series of human breast cancer gene-expression profiles: the Affymetrix validation set (a set derived from curated available datasets) and the NKI295 dataset (see Methods for details on the composition of these sets). Remarkably, the difference in survival between good and poor prognosis groups as defined by this Fra-1 classifier was highly significant in both series, with p=2.19×10⁻⁹ (log-rank test, DMFS as endpoint) on the NKI295 set and p=1.82×10⁻⁶ (log-rank test, BCSS as endpoint) on the Affymetrix validation set (FIG. 6B). In a multivariate Cox analysis, the Fra-1 classifier remained an independent predictor in the presence of known clinical predictors, including lymph node status, size of the tumor, estrogen receptor status, and Elston-Ellis grading in the 295 patients from the NKI (Table 1). A classifier containing 445 probes was generated using similar procedures in another breast cancer cell line (MDA-MB-231 cells), with similar outcome.

[0184] Interestingly, 188 probes, mapping to 168 different genes, were common to both the 447 probes set derived from LM2 cells and the 445 probes set derived from MDA-BM-231 cells (Table 2). Those genes potentially comprise gene products causally involved in metastasis. In this respect, inhibiting gene products whose expression is higher in poor prognosis tumors than in good prognosis tumors may result in inhibition of metastasis development.

### A Systematic Analysis of Fra-1-Regulated Genes Identifies 12 Genes Essential for Metastasis of Human Breast Cancer Cells

[0185] We then aimed to use the Fra-1 classifiers as a platform to search for Fra-1-regulated genes critically involved in the metastatic activity of human breast cancer cells. Among the 168 genes common between the LM2 and MDA-MB-231 classifiers, we selected the genes that are commonly down-regulated by two sh-RNAs targeting Fra-1 in both cell system, suggesting that the expression of those genes is activated, whether directly or indirectly, by Fra-1. Among those genes, we then selected those that are highly expressed specifically in poor prognosis breast cancer patients, since they correspond to the genes whose overexpression may contribute to metastasis formation. This strategy has yielded a list of 31 genes. The majority of these genes have been shown to play a role in cancer (progression). Importantly, one of them, the Metadherin gene, has recently been shown to be essential for the metastatic dissemination of breast cancer cells to the lungs (Hu et al., 2009), validating this approach.

[0186] We then systematically tested the effect of the silencing of each of these 31 genes in LM2 cells on metastasis formation in vivo. For this purpose, we inhibited the expression of each of these genes using at least 2 independent sh-RNAs, using lentiviral-mediated delivery. We tested those stably modified cell lines for pulmonary metastases formation in vivo after intravenous injection of the cells into nude mice. We used GFP-labeled cells and we then quantified metastasis formation in the lungs of mice by imaging of the GFP fluorescence 5 weeks after injection of the cells (FIG. 11). After statistical analysis, we identified twelve genes whose inhibition significantly suppressed metastasis (table 6), and many did so in a dramatic way.

[0187] Importantly, some of these genes encode enzymes, receptors or other proteins that appear to be druggable. For some of these, a small molecule inhibitor is already known and available (Table 4). We are now investigating the effects of these pharmacological inhibitors on metastasis formation in vivo. We are also repeating these experiments for the twelve positive genes using an independent experimental system, a luciferase in vivo imaging system, in order to further validate and extend these observations and to provide additional information on the kinetics and mechanism of the block in metastasis formation. Finally, we are investigating the effect of these twelve genes on primary tumor growth after orthotopic injection in the mammary fat pad of mice, to determine if their effect is specific for metastasis or also applies to primary tumor development.

### DISCUSSION

[0188] Metastatic spread of tumor cells accounts for most of cancer mortality, yet few of its key players have been uncovered. To identify targets for therapeutic intervention, it is imperative to resolve the molecular processes underlying metastasis. By combining genetic and functional analyses with RNA interference in a metastasis model system, we demonstrate that the transcription factor Fra-1 is strictly required for metastatic tumor cell dissemination. Correspondingly, it is overexpressed in several human tumors, including breast cancers. We show that Fra-1 depletion from human breast cancer cells had a dramatic impact on their ability to metastasize to the lungs from primary orthotopic tumors.

[0189] Many early oncogenic alterations, such as Ras mutations or overexpression of receptor tyrosine kinases, lead to the activation of the MAP kinase pathway and its downstream effector transcription factors. Among them are the members of the Fos (c-Fos, FosB, Fra-1 and Fra-2) and Jun (c-Jun, JunB, JunD) families of transcription factors, which are involved in the formation of AP-1 complexes (Eferl and Wagner, 2003). Fos and Jun proteins are established oncogenes (Eferl and Wagner, 2003), and Fra-1 has been shown to contribute to cell transformation or tumorigenesis in several settings (Adiseshaiah et al., 2007; Ramos-Nino et al., 2002; Vallone et al., 1997). We observed that Fra-1 depletion had little impact on the proliferative activity of human breast cancer cells in vitro and in vivo. In contrast, Fra-1 was strictly required for metastasis development in both rat and human tumor cells. These results suggest that Fra-1, at least in these two independent experimental settings, contributes relatively more to metastasis than it does to primary tumor growth. Although this does not preclude a contribution to early tumorigenesis as well, Fra-1 appears to behave as a tumor progression, rather than tumor-initiating, factor.

[0190] In addition to its implication in cell transformation, the role of Fra-1 in tumor cell invasion and migration has gained increasing interest over the years (Ozanne et al., 2006). However, the in vivo relevance of these data, namely whether Fra-1 corresponds to an important determinant in the complex cascade of events ultimately leading to metastasis has never been addressed. In vitro, Fra-1 has been shown to mediate cell motility or invasion (Adiseshaiah et al., 2007; Belguise et al., 2005; Vial et al., 2003). These results are in line with our observation that inhibition of metastasis upon Fra-1 silencing was associated with a reversion of cellular actin organization and a reduction in cell migration and invasion. We show here that Fra-1 silencing also induced re-expression and correct subcellular localization of E-cadherin, providing evidence that Fra-1 is causally involved in E-cadherin downregulation in breast cancer cells. This is consistent with the finding that Fra-1 expression levels negatively correlate with E-cadherin expression in breast cancer cell lines (Zajchowski et al., 2001). Interestingly, this regulation appears to be mutual, as in turn, induction of EMT through inhibition of E-cadherin function upregulates Fra-1 expression (Andersen et al., 2005). Suppression of E-cadherin expression denotes a central event in EMT and is associated with tumor invasiveness, metastatic dissemination and poor patient prognosis (Thiery and Sleeman, 2006). While evidence of abundant EMT in clinical breast cancer specimens has been lagging (Hugo et al., 2007), there is ample experimental evidence supporting an intimate role for EMT in allowing tumor cells to disrupt cell-cell contacts, become anoikis-resistant and invade, all contributing to the metastatic process (Christofori, 2006; Liotta and Kohn, 2004; Thiery and Sleeman, 2006; Yang and Weinberg, 2008). Interestingly, it has recently been demonstrated that human stem-like breast cancer cells express markers associated with EMT (Mani et al., 2008). Our results suggest that Fra-1 acts as a central determinant in breast cancer metastasis, at least in part, by acting as a critical regulator of EMT.

[0191] Extending our identification of Fra-1 as an important contributor to metastasis, we demonstrate that a Fra-1-dependent transcriptome, which is based on Fra-1-depleted human breast carcinoma cells, is associated with high prognostic power in human breast cancer. The classifier presented here thus functionally connects prognostic power in breast cancer recurrence with a defined set of genes whose expression is regulated by a single transcription factor that is functionally validated as a causal factor for the disease. As such, it highlights the importance of Fra-1 in breast cancer metastasis in human patients and presents us with a new tool for patient stratification. As it is directly connected to the functional properties of Fra-1 in metastasis, the classifier may also contain candidate target genes that can be exploited for therapeutic intervention. Our data merit efforts to inactivate Fra-1 or components of its signaling pathway for clinical intervention of human breast cancer and several other cancers in which its expression is increased.

### Methods

### Vectors and Antibodies

[0192] RIE (gift from R. D. Beauchamp, Nashville, Tenn., and K. D. Brown, Cambridge, UK) and RK3E (ATCC) cells were retrovirally transduced with murine TrkB and BDNF expression constructs as previously described (Douma et al., 2004), except that the TrkB cDNA was subcloned into pMSCV-blasticidin. BDNF (N-20), Fra-1 (R-20), and Trk (C-14) antibodies were from Santa Cruz, α-catenin (610193), β-catenin (14), γ-catenin (610253) and E-cadherin (610181) antibodies were from Becton Dickinson. α-tubulin antibody (DM1A) was from Sigma. Ki67 antibody (MM1) was from Vision Biosystems. Phospho-Smad2 (3101) antibody was from Cell Signaling Technologies.

### Cell Culture

[0193] RIE-1 cells, RK3E cells, MDA-MB-231 cells (gift from L. Smit, Amsterdam) and LM2 cells (subline#4173, gift from Prof. J. Massague, New York) were cultured in DMEM (Life Technologies) supplemented with 10% FCS (Greiner bio-one), 2 mM glutamine, 100 units mi⁻¹ penicillin, and 0.1 mg mi⁻¹ streptomycin (all Gibco). To measure cell proliferation rates, cells were seeded at 3.10⁵ (RK3E) or 1.10⁶ (MDA-MB-231) per 100-mm dish. For each cell line, cells from three dishes were trypsinized and counted every two days.

### Retro- and Lentiviral Transduction

[0194] Retroviral transductions were performed as described (http://www.stanford.edu/group/nolan/retroviral systems/phx.html). Retroviral silencing of Fra-1 in RK3E cells was performed using the pRS-puro vector (Brummelkamp et al., 2002) with the following targeting sequences: sh-Fra-1(1) (TAACTAGCCTAGAACACTA) and sh-Fra-1(2) (GAAGTTCCACCTTGTGCCA). As negative control, pRS-puro without insert was used. RK3E cells were infected 4 times with viral supernatant and selected for puromycin resistance. We confirmed similar expression levels of TrkB and BNDF in all cell populations. Lentiviral transductions were performed as described previously (Ivanova et al., 2006). Silencing of Fra-1 in LM2 and MDA-MB-231 cells was performed using the following targeting sequences: sh-Fra-1(1) (GTAGATCCTTAGAGGTCCT) and sh-Fra-1(2) (GGCCTGTGCTTGAACCTGA). As negative control, vector without insert was used. Cells were infected once (2.10⁶ cells with 1,5.10⁷ viral particles) and GFP-positive cells were selected by fluorescence activated cell sorting (FACS).

### In Vivo Inoculation of Tumor Cells

[0195] All animal work was done in accordance with a protocol approved by the Institutional Animal Experiment Ethics Committee. Female Balb/c nude mice aged 6-8 weeks were used for all xenografting experiments. RK3E cells were injected sub-cutaneously (10⁵ viable cells in 150 μl PBS in each flank). Mice were sacrificed when the tumor length reached a size of 15 mm or when the tumors started to ulcerate. Tumor width (W) and length (L) were measured twice a week using a caliper and tumor volume was estimated using the formula (L·W²/2). LM2 cells were injected in the 4^{th} mammary fat pad of nude mice (10⁶ cells in 50 μl of a 1:1 mixture of PBS and growth factor-reduced Matrigel). Tumors were surgically removed after one month and mice were kept for 6 additional weeks. For experimental lung metastasis formation, MDA-MB-231 and LM2 cells were injected into the lateral tail vein (10⁶ or 10⁵ viable cells in 150 μl PBS). All animals were sacrificed three months or one month after injection, respectively.

### Quantification of Pulmonary Metastasis

[0196] Mice were sacrificed using CO₂ asphyxiation and the lungs were subsequently removed and dissected. Lungs were fixed in an Ethanol/Acetic acid/Formol saline fixative (EAF) and examined under a stereoscope. Macroscopic pulmonary metastases were identified as aberrant white masses on the surface of the lungs. For histological assessment of metastases, 8 sections from independent positions in the lungs were stained with hemoatoxylin-eosin (H&E) and the total number of metastases in these sections was determined. Alternatively, lungs were fixed in formaldehyde and imaged within 2 hours by fluorescence microscopy for quantification of the fluorescence emitted by GFP-labeled LM2 cells. Images were taken with the same intensities and exposure times, and the mean fluorescence intensity per surface area occupied by tumor cells was quantified using ImageJ software (http://rsb.info.nih.gov/ij/download.html) with the MBF plug-in bundle (http://www.macbiophotonics.ca/downloads.htm).

### In Vivo Analysis of Fra-1 Target Genes

[0197] Silencing of Fra-1-regulated genes in LM2 cells was performed using pLKO.1 vectors obtained from the Sigma Mission sh-RNA library. GFP-labelled LM2 cells were infected with lentivirus-expressing sh-RNAs, selected with puromycin for 2 days and injected in mice 7 days after lentiviral infection. Cells infected with an empty vector were used as a control. Female Balb/c nude mice 6-8 weeks of age were used for all xenografting experiments. LM2 cells were injected into the lateral tail vein (10⁵ viable cells in 150 μl PBS). Animals were sacrificed 5 weeks after injection using CO₂ asphyxiation and the lungs were subsequently dissected and imaged within 2 hours by fluorescence microscopy for quantification of the fluorescence emitted by GFP-labeled LM2 cells. Images were taken with the same intensities and exposure times, and the mean fluorescence intensity was quantified using ImageJ software (http://rsb.info.nih.gov/ij/download.html) with the MBF plug-in bundle (http://www.macbiophotonics.ca/downloads.htm). Fluorescence intensity observed in the lungs of mice injected with cells carrying sh-RNAs were normalized to the fluorescence intensity of the lungs of mice injected at the same time with control cells.

### Migration and Invasion Assays

[0198] RK3E clones (2,5.10⁵ cells/well) and MDA-MB-231 cells (3.10⁵ cells/well) were seeded in serum free medium into the upper well of BD BioCoat™ Control 8.0 μm PET Membrane 6-well Cell Culture Inserts for the migration assays, or BD BioCoat™ BD Matrigel™ Invasion Chamber, 8.0 μm PET Membrane 6-well Cell Culture Inserts for the invasion assays. Migration and invasion towards the lower well containing medium with 10% serum were assessed 24 hours later. Membranes were processed according to the manufacturer's recommendation. Migrating cells were stained with crystal violet and counted using bright-field microscopy (average number of cells on 8 fields at 100× magnification).

### Immunofluorescence

[0199] 1.10⁵ cells were plated on collagen-coated Labtek slides (Nalge Nunc International) and left overnight in complete medium, washed in PBS, fixed in 4% PBS-buffered formaldehyde and processed for indirect immunofluorescence. Fra-1 antibody (1:200), E-cadherin antibody (1:200) and Alexa568-coupled phalloidin (A12380, Invitrogen; 1:200) were used.

### Immunohistochemistry

[0200] Histological sections and haematoxylin-eosin staining were performed using standard procedures. Paraffin sections were deparaffinized, rehydrated, pretreated in 0.1 mM sodium citrate pH 6.0, washed and incubated with peroxide. The tissue was incubated with primary antibodies for Fra-1 (1:200) or Ki-67 (1:4000). Secondary antibody was PowerVision+(DPVB+999HRP; ImmunoLogic). Peroxidase activity was detected with Liquid DAB (K3468; DAKO).

### SYBR-Green Real-Time RT-PCR

[0201] Total RNA was DNase-treated with RQ1 RNase-Free DNase (Promega). Reverse transcription was performed using Superscript II first strand kit (Invitrogen). qRT-PCR was performed with the SYBR Green PCR Master Mix (Applied Biosystems) on an ABI PRISM 7700 Sequence Detection System. The primer sets used were as follows: rat Fra-1: 5′-GCAGACACAGACAGTCCAG-3′ and 5′-CCATCCACTGCAATTCCTG-3′; rat HPRT1: 5′-CTGGTGAAAAGGACCTCTCG-3′ and 5′-TGAAGTGCTCATTATAGTCAAGGGCA-3′. mRNA levels were normalized using HPRT1 mRNA levels.

[0202] The primer sets used to detect Fra-1-regulated genes were as follows: human ABHD11: 5′-TTCAACTCCATCGCCAAGAT-3′ and 5′-CACCGTGGTTACGAGCATC-3′; human ADORA2B: 5′-TCTGTGTCCCGCTCAGGT-3′ and 5′-GATGCCAAAGGCAAGGAC-3′; human BIRC5: 5′-GCCCAGTGTTTCTTCTGCTT-3′ and 5′-CCGGACGAATGCTTTTTATG-3′; human CENPM: 5′-AACACGGCCACCATCTTG-3′ and 5′-GGGACTTTGCCAAGTGGAC-3′; human CHAF1A: 5′-GGAGAGGAGAGACGAGCAGA-3′ and 5′-CTTGCTCCCGTTCACATTG-3′; human CHML: 5′-TTATCTCCCACCAGGTTCCTC-3′ and 5′-TTCTCTTATTTCTTCTTTGAAGGTGAT-3′; human D21S2056E: 5′-GCAAGGCTGGGAAGAAAGA-3′ and 5′-GGGTGCAGGATCTCAGTCAT-3′; human E2F1: 5′-TCCAAGAACCACATCCAGTG-3′ and 5′-CTGGGTCAACCCCTCAAG-3′; human EZH2: 5′-TGGTCTCCCCTACAGCAGAA-3′ and 5′-TCATCTCCCATATAAGGAATGTTATG-3′; human FEN1: 5′-ACCCCGAACCAAGCTTTAG-3′ and 5′-GGGCCACATCAGCAATTAGT-3′; human H2AFZ: 5′-CACCGTGGGTCCGATTAG-3′ and 5′-GTCCTTTCCAGCCTTACCG-3′; human IGFBP3: 5′-AACGCTAGTGCCGTCAGC-3′ and 5′-CGGTCTTCCTCCGACTCAC-3′; human PAICS: 5′-TTTTCAGTTATTACAGGAAGCAGGT-3′ and 5′-TGAAAGCTGTCTCCCCACAT-3′; human PHLDA1: 5′-TCTGCACAAAAACTGGTGAGAC-3′ and 5′-ACTGCTCAGCCTGCCATC-3′; human PPP2R3A: 5′-CAGACTCCAGAGGTGATCAAGA-3′ and 5′-CGGGGACTACTTGGAGAGGT-3′; human PTGES: 5′-ACGCTGCTGGTCATCAAGA-3′ and 5′-TCTTCCGCAGCCTCACTT-3′; human PTP4A1: 5′-GGCCACAATCTTCAATGAGTAA-3′ and 5′-TGCTGTGCCTGGCAGTAA-3′; human SEC14L1: 5′-AGGGGCTGAGTGGTGATG-3′ and 5′-GTAGTCGGCATCTAGTTTGTCGT-3′; human SFN: 5′-CAGAGTCCGGCATTGGTC-3′ and 5′-GCTCTGGGGACACACAGG-3′; human SH3GL1: 5′-AGGAGGTGGCAGAAACCAG-3′ and 5′-TGACTCACCTGCTCGATGTC-3′; human TJAP1: 5′-AGAGCTGCCGACAAACAGAC-3′ and 5′-AGTCATTCTGGGAGGTGACG-3′; human TRFP: 5′-GGAACCCTGCGTTTCTACTG-3′ and 5′-ACAGGCATCTGGGACACAC-3′; human YTHDF1: 5′-CGACGACTTTGCTCACTACG-3′ and 5′-TTCGACTCTGCCGTTCCTT-3′; mRNA levels were normalized using beta-Actin mRNA levels.

### Western Blot Analysis

[0203] Western blotting was performed using standard procedures. We used goat antibodies to mouse (1706516, BioRad) and to rabbit (ALI0404, BioSource) conjugated with horseradish peroxidase as secondary antibodies, and developed the blots using ECL (Dura, Pierce)

### Gel Shift Experiments

[0204] Gel shift experiments were performed as previously described (Desmet et al., 2004). The sense strand of the AP-1 probe used had the following sequence: 5′-GGTTCGCTTGATGAGTCAGCCGGAA-3′. For supershift experiments, the nuclear extracts were pre-incubated with 2 μg of anti-Fra-1 antibody for 30 min

### Microarray Gene Expression Profiling

[0205] Full description of the methods for each experiment is available at http://www.ebi.ac.uk/microarray-as/aer/#ae-main[0] (accession numbers E-NCMF-20 and E-NCMF-21). Briefly, total RNA was isolated, purified and amplified. Amplified (a)RNA was subsequently labeled either with Cy5 or Cy3. Labeled aRNA was hybridized to oligo-arrays (Agilent 4× whole genome arrays for rat or human) and a dye-swap was performed for each experimental sample.

### Classifier Generation

[0206] We collected six publicly available datasets containing both raw gene expression microarray data of breast cancer samples and the corresponding information on distant metastasis-free survival and breast cancer specific survival. In order to avoid cross-platform discrepancies, the study was limited to Human Genome HGU-133A Affymetrix© arrays. The datasets were downloaded from NCBI's Gene Expression Omnibus (GEO, http://www.ncbi.nlm.nih.gov/geo/) with the following identifiers; GSE6532 (Loi et al., 2007), GSE3494 (Miller et al., 2005), GSE1456 (Pawitan et al., 2005), GSE7390 (Desmedt et al., 2007) and GSE5327 (Minn et al., 2005). The Chin et al. (Chin et al., 2006) data set was downloaded from ArrayExpress (http://www.ebi.ac.uk/, identifier E-TABM-158).

[0207] To ensure comparability between the different datasets, they were all subjected to the same pre-processing procedure. Microarray quality-control assessment was carried out using the R AffyPLM package, available from the Bioconductor web site (http://www.bioconductor.org.). We applied the Relative Log Expression (RLE) and Normalized Unscaled Standard Errors (NUSE) tests. Chip pseudo-images were produced to assess artefacts on arrays that failed to pass the preceding quality control tests. Approximately 1 to 5% of the arrays of the datasets did not pass the quality control tests. Selected arrays were normalized according to a 3-step procedure using the RMA expression measure algorithm (http://www.bioconductor.org): RMA background correction convolution, median centering of each gene across arrays separately for each data set and quantile normalization of all arrays. Out of the 947 unique collected microarray samples of sufficient quality, 509 had Distant Metastasis Free Survival (DMFS) data available. We employed these samples as training set, and will denote this sets as the ‘Affymetrix training set’. From the 947 samples, we also selected a separate validation set consisting of 388 samples for which breast cancer specific survival (BCSS) was available. We denote this set as the ‘Affymetrix validation set’. This set is completely non-overlapping in terms of samples with the Affymetrix training set, and is therefore a fully independent validation set.

[0208] The experimental Fra-1 signature was derived from the microarray analysis of Fra-1-depleted LM2 cells versus empty vector control cells. Probes that were significantly regulated in both sh-Fra-1 cell populations and in two independent microarray analyses were selected. This resulted in a set of 1140 probes, significantly regulated (p<10⁻⁸). The probes were converted to the corresponding probes on Affymetrix U133A arrays via Martview from BioMart (http://www.biomart.org/index.html). As this probe set contained multiple probes mapping to the same Entrez IDs, we selected a single Affymetrix© HGU-133A probe for each Entrez ID in the following manner. Probes were selected based on the Affymetrix algorithm probe extension, favoring ‘_at’ over ‘_x_at’ over ‘_s_at’. Expression of remaining duplicate probes were averaged. From this set of 1234 unique probes, probes were extracted that exhibited a significant p-value (p<0.05, log-rank test) on the Affymetrix training set. This resulted in a subset of 183 probes, the Fra-1 signature. We employed the hypergeometric test to determine whether a set of probes of this size and significantly associated with outcome, could have been selected from a randomly selected set of 1234 probes. Next, we employed the Affymetrix training set to define a nearest centroid classifier for these 183 probes. The ‘poor prognosis’ centroid was derived from the samples with a metastatic event before 60 months of follow-up. The ‘good prognosis’ centroid was derived from the samples with no metastatic event and a follow-up longer than 60 months.

[0209] For the validation of the Fra-1 classifier, we employed, in addition to the Affymetrix training set, the series of 295 breast cancer samples from the Netherlands Cancer Institute (van de Vijver et al., 2002). We refer to this set as ‘NKI295’. Each sample in the independent validation sets was assigned to the nearest centroid as determined by the highest Spearman rank order correlation score between the gene expression value of the corresponding probe se is of each sample and the centroid values of the ‘poor prognosis’ and ‘good prognosis’ centroid. For the validation of the Fra-1 classifier on the NKI295, the Rosetta© reporter IDs were mapped to the corresponding Entrez IDs. When multiple reporters mapped to the same Entrez ID, we selected the probe with the highest variance.

[0210] Survival analyses were performed using the Kaplan-Meier estimate of the survival function. Comparison between survival curves was performed using the log-rank test. Hazard ratios were estimated using a multivariate Cox proportional hazard model. The endpoints of these analyses were DMFS for the ‘Affymetrix training set and the NKI295 and BCSS for the Affymetrix validation set.

TABLE 1
Multivariate analysis of the Fra-1 classifier
and clinical variables on the NKI295.

| | | | 95% CI for Hazard Ratio | |
|---|---|---|---|---|
| | P-value | Hazard ratio | Lower | Upper |
| Grade | 9.6E−2 | 1.32 | 0.95 | 1.83 |
| LN | 3.3E−2 | 0.82 | 0.55 | 1.23 |
| ER | 5.5E−2 | 1.15 | 0.72 | 1.85 |
| Size | 1.4E−2 | 1.03 | 1.00 | 1.05 |
| Fra1-classifier | 7.4E−5 | 2.83 | 1.69 | 4.73 |

LN: lymph node status
ER: Estrogen receptor status

TABLE 2
169 genes with marked selection of the 32 genes

| | | Gene Description |
|---|---|---|
| | | SEQ ID NO (represents a human (homo sapiens) |
| | | cDNA sequence of said gene) |
| Classifier | | A list of these cDNA and corresponding amino acid |
| Gene ID | HGNC Symbol | sequences of these 169 genes is given after Table 5 |
| 1 | ABHD11 | abhydrolase domain containing 11 |
| | | SEQ ID NO: 1; SEQ ID NO: 170 |
| 2 | ACP6 | acid phosphatase 6, lysophosphatidic |
| | | SEQ ID NO: 33; SEQ ID NO: 202 |
| 3 | ACSL5 | acyl-CoA synthetase long-chain family member 5 |
| | | SEQ ID NO: 34; SEQ ID NO: 203 |
| 4 | ACTN1 | Actinin, alpha 1 |
| | | SEQ ID NO: 35; SEQ ID NO: 204 |
| 5 | ADORA2B | adenosine A2b receptor |
| | | SEQ ID NO: 2; SEQ ID NO: 171 |
| 6 | AES | amino-terminal enhancer of split |
| | | SEQ ID NO: 36; SEQ ID NO: 205 |
| 7 | AKT2 | v-akt murine thymoma viral oncogene homolog 2 |
| | | SEQ ID NO: 37; SEQ ID NO: 206 |
| 8 | ANAPC2 | anaphase promoting complex subunit 2 |
| | | SEQ ID NO: 38; SEQ ID NO: 207 |
| 9 | ANXA7 | annexin A7 |
| | | SEQ ID NO: 39; SEQ ID NO: 208 |
| 10 | APH1B | anterior pharynx defective 1 homolog B (C. elegans) |
| | | SEQ ID NO: 40; SEQ ID NO: 209 |
| 11 | ARL6IP5 | ADP-ribosylation-like factor 6 interacting protein 5 |
| | | SEQ ID NO: 41; SEQ ID NO: 210 |
| 12 | ARPC5 | actin related protein 2/3 complex, subunit 5, 16 kDa |
| | | SEQ ID NO: 42; SEQ ID NO: 211 |
| 13 | ATP1B1 | ATPase, Na+/K+ transporting, beta 1 polypeptide |
| | | SEQ ID NO: 43; SEQ ID NO: 212 |
| 14 | ATP9A | ATPase, Class II, type 9A |
| | | SEQ ID NO: 44; SEQ ID NO: 213 |
| 15 | AURKB | aurora kinase B |
| | | SEQ ID NO: 3; SEQ ID NO: 172 |
| 16 | B4GALT5 | UDP-Gal:betaGlcNAc beta 1,4-galactosyltransferase, |
| | | polypeptide 5 |
| | | SEQ ID NO: 45; SEQ ID NO: 214 |
| 17 | BECN1 | beclin 1 (coiled-coil, myosin-like BCL2 interacting protein) |
| | | SEQ ID NO: 46; SEQ ID NO: 215 |
| 18 | BIRC5 | baculoviral IAP repeat-containing 5 (survivin) |
| | | SEQ ID NO: 4; SEQ ID NO: 173 |
| 19 | BMP1 | bone morphogenetic protein 1 |
| | | SEQ ID NO: 47; SEQ ID NO: 216 |
| 20 | BTG1 | B-cell translocation gene 1, anti-proliferative |
| | | SEQ ID NO: 48; SEQ ID NO: 217 |
| 21 | C1orf144 | chromosome 1 open reading frame 144 |
| | | SEQ ID NO: 49; SEQ ID NO: 218 |
| 22 | C22orf18 | chromosome 22 open reading frame 18 |
| | | SEQ ID NO: 5; SEQ ID NO: 174 |
| 23 | CALU | Calumenin |
| | | SEQ ID NO: 50; SEQ ID NO: 219 |
| 24 | CASC3 | cancer susceptibility candidate 3 |
| | | SEQ ID NO: 51; SEQ ID NO: 220 |
| 25 | CASP1 | caspase 1, apoptosis-related cysteine protease (interleukin 1, |
| | | beta, convertase) |
| | | SEQ ID NO: 52; SEQ ID NO: 221 |
| 26 | CBPIN | CCNDBP1 interactor |
| | | SEQ ID NO: 53; SEQ ID NO: 222 |
| 27 | CD164 | CD164 antigen, sialomucin |
| | | SEQ ID NO: 54; SEQ ID NO: 223 |
| 28 | CD99 | CD99 antigen |
| | | SEQ ID NO: 55; SEQ ID NO: 224 |
| 29 | CDC42BPB | CDC42 binding protein kinase beta (DMPK-like) |
| | | SEQ ID NO: 56; SEQ ID NO: 225 |
| 30 | CELSR2 | cadherin, EGF LAG seven-pass G-type receptor 2 (flamingo |
| | | homolog, Drosophila) |
| | | SEQ ID NO: 57; SEQ ID NO: 226 |
| 31 | CGI-119 | CGI-119 protein |
| | | SEQ ID NO: 58; SEQ ID NO: 227 |
| 32 | CHAF1A | chromatin assembly factor 1, subunit A (p150) |
| | | SEQ ID NO: 6; SEQ ID NO: 175 |
| 33 | CHML | choroideremia-like (Rab escort protein 2) |
| | | SEQ ID NO: 7; SEQ ID NO: 176 |
| 34 | CIAPIN1 | cytokine induced apoptosis inhibitor 1 |
| | | SEQ ID NO: 59; SEQ ID NO: 228 |
| 35 | COL4A2 | collagen, type IV, alpha 2 |
| | | SEQ ID NO: 60; SEQ ID NO: 229 |
| 36 | COPB | coatomer protein complex, subunit beta |
| | | SEQ ID NO: 61; SEQ ID NO: 230 |
| 37 | CPT2 | carnitine palmitoyltransferase II |
| | | SEQ ID NO: 62; SEQ ID NO: 231 |
| 38 | CRIM1 | cysteine rich transmembrane BMP regulator 1 (chordin-like) |
| | | SEQ ID NO: 63; SEQ ID NO: 232 |
| 39 | CRYL1 | crystallin, lambda 1 |
| | | SEQ ID NO: 64; SEQ ID NO: 233 |
| 40 | CUGBP2 | CUG triplet repeat, RNA binding protein 2 |
| | | SEQ ID NO: 65; SEQ ID NO: 234 |
| 41 | CXorf6 | chromosome X open reading frame 6 |
| | | SEQ ID NO: 66; SEQ ID NO: 235 |
| 42 | CYBRD1 | cytochrome b reductase 1 |
| | | SEQ ID NO: 67; SEQ ID NO: 236 |
| 43 | D21S2056E | DNA segment on chromosome 21 (unique) 2056 expressed |
| | | sequence |
| | | SEQ ID NO: 8; SEQ ID NO: 177 |
| 44 | DCC1 | defective in sister chromatid cohesion homolog 1 (S. cerevisiae) |
| | | SEQ ID NO: 68; SEQ ID NO: 237 |
| 45 | DCTN6 | dynactin 6 |
| | | SEQ ID NO: 69; SEQ ID NO: 238 |
| 46 | DGCR8 | DiGeorge syndrome critical region gene 8 |
| | | SEQ ID NO: 70; SEQ ID NO: 239 |
| 47 | DNCLI2 | dynein, cytoplasmic, light intermediate polypeptide 2 |
| | | SEQ ID NO: 71; SEQ ID NO: 240 |
| 48 | DVL3 | dishevelled, dsh homolog 3 (Drosophila) |
| | | SEQ ID NO: 72; SEQ ID NO: 241 |
| 49 | DYRK2 | Dual-specificity tyrosine-(Y)-phosphorylation regulated kinase 2 |
| | | SEQ ID NO: 73; SEQ ID NO: 242 |
| 50 | DYSF | dysferlin, limb girdle muscular dystrophy 2B (autosomal |
| | | recessive) |
| | | SEQ ID NO: 74; SEQ ID NO: 243 |
| 51 | E2F1 | E2F transcription factor 1 |
| | | SEQ ID NO: 9; SEQ ID NO: 178 |
| 52 | EIF2S2 | eukaryotic translation initiation factor 2, subunit 2 beta, 38 kDa |
| | | SEQ ID NO: 75; SEQ ID NO: 244 |
| 53 | EIF4A2 | eukaryotic translation initiation factor 4A, isoform 2 |
| | | SEQ ID NO: 76; SEQ ID NO: 245 |
| 54 | EXT2 | exostoses (multiple) 2 |
| | | SEQ ID NO: 77; SEQ ID NO: 246 |
| 55 | EZH2 | enhancer of zeste homolog 2 ( [symbol] ) |
| | | SEQ ID NO: 10; SEQ ID NO: 179 |
| 56 | FAT4 | FAT tumor suppressor homolog 4 (Drosophila) |
| | | SEQ ID NO: 78; SEQ ID NO: 247 |
| 57 | FEN1 | flap structure-specific endonuclease 1 |
| | | SEQ ID NO: 11; SEQ ID NO: 180 |
| 58 | FLJ12529 | pre-mRNA cleavage factor I, 59 kDa subunit |
| | | SEQ ID NO: 79; SEQ ID NO: 248 |
| 59 | FLJ20364 | hypothetical protein FLJ20364 |
| | | SEQ ID NO: 80; SEQ ID NO: 249 |
| 60 | FNDC3A | fibronectin type III domain containing 3A |
| | | SEQ ID NO: 81; SEQ ID NO: 250 |
| 61 | FOSL1 | FOS-like antigen 1 |
| | | SEQ ID NO: 12; SEQ ID NO: 181 |
| 62 | FOXM1 | forkhead box M1 |
| | | SEQ ID NO: 13; SEQ ID NO: 182 |
| 63 | GCDH | glutaryl-Coenzyme A dehydrogenase |
| | | SEQ ID NO: 82; SEQ ID NO: 251 |
| 64 | GDF15 | growth differentiation factor 15 |
| | | SEQ ID NO: 83; SEQ ID NO: 252 |
| 65 | GLRX | glutaredoxin (thioltransferase) |
| | | SEQ ID NO: 84; SEQ ID NO: 253 |
| 66 | GOLT1B | golgi transport 1 homolog B (S. cerevisiae) |
| | | SEQ ID NO: 85; SEQ ID NO: 254 |
| 67 | H2AFZ | H2A histone family, member Z |
| | | SEQ ID NO: 14; SEQ ID NO: 183 |
| 68 | HUWE1 | HECT, UBA and WWE domain containing 1 |
| | | SEQ ID NO: 86; SEQ ID NO: 255 |
| 69 | ID1 | inhibitor of DNA binding 1, dominant negative helix-loop-helix |
| | | protein |
| | | SEQ ID NO: 87; SEQ ID NO: 256 |
| 70 | IDH3A | isocitrate dehydrogenase 3 (NAD+) alpha |
| | | SEQ ID NO: 88; SEQ ID NO: 257 |
| 71 | IFNGR1 | interferon gamma receptor 1 |
| | | SEQ ID NO: 89; SEQ ID NO: 258 |
| 72 | IFRG28 | 28 kD interferon responsive protein |
| | | SEQ ID NO: 90; SEQ ID NO: 259 |
| 73 | IGFBP3 | insulin-like growth factor binding protein 3 |
| | | SEQ ID NO: 15; SEQ ID NO: 184 |
| 74 | IL15 | interleukin 15 |
| | | SEQ ID NO: 91; SEQ ID NO: 260 |
| 75 | IMP-2 | IGF-II mRNA-binding protein 2 |
| | | SEQ ID NO: 92; SEQ ID NO: 261 |
| 76 | ITGA5 | integrin, alpha 5 (fibronectin receptor, alpha polypeptide) |
| | | SEQ ID NO: 93; SEQ ID NO: 262 |
| 77 | ITGB3 | integrin, beta 3 (platelet glycoprotein IIIa, antigen CD61) |
| | | SEQ ID NO: 94; SEQ ID NO: 263 |
| 78 | ITM1 | integral membrane protein 1 |
| | | SEQ ID NO: 95; SEQ ID NO: 264 |
| 79 | ITM2B | integral membrane protein 2B |
| | | SEQ ID NO: 96; SEQ ID NO: 265 |
| 80 | ITM2C | integral membrane protein 2C |
| | | SEQ ID NO: 97; SEQ ID NO: 266 |
| 81 | KIAA0182 | KIAA0182 protein |
| | | SEQ ID NO: 98; SEQ ID NO: 267 |
| 82 | KIAA1102 | KIAA1102 protein |
| | | SEQ ID NO: 99; SEQ ID NO: 268 |
| 83 | KLF4 | Kruppel-like factor 4 (gut) |
| | | SEQ ID NO: 100; SEQ ID NO: 269 |
| 84 | KLF6 | Kruppel-like factor 6 |
| | | SEQ ID NO: 101; SEQ ID NO: 270 |
| 85 | LEPROTL1 | leptin receptor overlapping transcript-like 1 |
| | | SEQ ID NO: 102; SEQ ID NO: 271 |
| 86 | LIMS1 | LIM and senescent cell antigen-like domains 1 |
| | | SEQ ID NO: 103; SEQ ID NO: 272 |
| 87 | LOC203069 | hypothetical protein LOC203069 |
| | | SEQ ID NO: 104; SEQ ID NO: 273 |
| 88 | LOC440085 | similar to prothymosin alpha |
| | | SEQ ID NO: 105; SEQ ID NO: 274 |
| 89 | LOXL2 | lysyl oxidase-like 2 |
| | | SEQ ID NO: 106; SEQ ID NO: 275 |
| 90 | LTBP3 | latent transforming growth factor beta binding protein 3 |
| | | SEQ ID NO: 107; SEQ ID NO: 276 |
| 91 | MAOA | monoamine oxidase A |
| | | SEQ ID NO: 108; SEQ ID NO: 277 |
| 92 | MAPKAPK3 | mitogen-activated protein kinase-activated protein kinase 3 |
| | | SEQ ID NO: 109; SEQ ID NO: 278 |
| 93 | MARCKS | myristoylated alanine-rich protein kinase C substrate |
| | | SEQ ID NO: 110; SEQ ID NO: 279 |
| 94 | MBD3 | methyl-CpG binding domain protein 3 |
| | | SEQ ID NO: 111; SEQ ID NO: 280 |
| 95 | MCM10 | MCM10 minichromosome maintenance deficient 10 |
| | | ( [symbol] ) |
| | | SEQ ID NO: 16; SEQ ID NO: 185 |
| 96 | MCM2 | MCM2 minichromosome maintenance deficient 2, mitotin |
| | | ( [symbol] ) |
| | | SEQ ID NO: 17; SEQ ID NO: 186 |
| 97 | MICAL2 | microtubule associated monoxygenase, calponin and LIM |
| | | domain containing 2 |
| | | SEQ ID NO: 112; SEQ ID NO: 281 |
| 98 | MTDH | Metadherin |
| | | SEQ ID NO: 18; SEQ ID NO: 187 |
| 99 | MYC | v-myc myelocytomatosis viral oncogene homolog (avian) |
| | | SEQ ID NO: 113; SEQ ID NO: 282 |
| 100 | MYO1F | myosin IF |
| | | SEQ ID NO: 114; SEQ ID NO: 283 |
| 101 | NF2 | neurofibromin 2 (bilateral acoustic neuroma) |
| | | SEQ ID NO: 115; SEQ ID NO: 284 |
| 102 | NINJ1 | ninjurin 1 |
| | | SEQ ID NO: 116; SEQ ID NO: 285 |
| 103 | NMD3 | NMD3 homolog (S. cerevisiae) |
| | | SEQ ID NO: 117; SEQ ID NO: 286 |
| 104 | NUAK1 | NUAK family, SNF1-like kinase, 1 |
| | | SEQ ID NO: 118; SEQ ID NO: 287 |
| 105 | NUP62 | nucleoporin 62 kDa |
| | | SEQ ID NO: 119; SEQ ID NO: 288 |
| 106 | P2RY11 | purinergic receptor P2Y, G-protein coupled, 11 |
| | | SEQ ID NO: 120; SEQ ID NO: 289 |
| 107 | P4HA2 | procollagen-proline, 2-oxoglutarate 4-dioxygenase (proline 4- |
| | | hydroxylase), alpha polypeptide II |
| | | SEQ ID NO: 121; SEQ ID NO: 290 |
| 108 | PAICS | phosphoribosylaminoimidazole carboxylase, |
| | | phosphoribosylaminoimidazole succinocarboxamide |
| | | synthetase |
| | | SEQ ID NO: 19; SEQ ID NO: 188 |
| 109 | PCOLN3 | procollagen (type III) N-endopeptidase |
| | | SEQ ID NO: 20; SEQ ID NO: 189 |
| 110 | PDCD4 | programmed cell death 4 (neoplastic transformation inhibitor) |
| | | SEQ ID NO: 122; SEQ ID NO: 291 |
| 111 | PDPK1 | 3-phosphoinositide dependent protein kinase-1 |
| | | SEQ ID NO: 123; SEQ ID NO: 292 |
| 112 | PFKM | phosphofructokinase, muscle |
| | | SEQ ID NO: 124; SEQ ID NO: 293 |
| 113 | PHLDA1 | pleckstrin homology-like domain, family A, member 1 |
| | | SEQ ID NO: 21; SEQ ID NO: 190 |
| 114 | PHLDA2 | pleckstrin homology-like domain, family A, member 2 |
| | | SEQ ID NO: 125; SEQ ID NO: 294 |
| 115 | PLSCR4 | phospholipid scramblase 4 |
| | | SEQ ID NO: 126; SEQ ID NO: 295 |
| 116 | PPP2R3A | protein phosphatase 2 (formerly 2A), regulatory subunit B″, |
| | | alpha |
| | | SEQ ID NO: 22; SEQ ID NO: 191 |
| 117 | PSMD7 | proteasome (prosome, macropain) 26S subunit, non-ATPase, 7 |
| | | (Mov34 homolog) |
| | | SEQ ID NO: 127; SEQ ID NO: 296 |
| 118 | PTBP1 | polypyrimidine tract binding protein 1 |
| | | SEQ ID NO: 128; SEQ ID NO: 297 |
| 119 | PTGES | prostaglandin E synthase |
| | | SEQ ID NO: 23; SEQ ID NO: 192 |
| 120 | PTK2 | PTK2 protein tyrosine kinase 2 |
| | | SEQ ID NO: 129; SEQ ID NO: 298 |
| 121 | PTP4A1 | protein tyrosine phosphatase type IVA, member 1 |
| | | SEQ ID NO: 24; SEQ ID NO: 193 |
| 122 | QKI | quaking homolog, KH domain RNA binding (mouse) |
| | | SEQ ID NO: 130; SEQ ID NO: 299 |
| 123 | RALA | v-ral simian leukemia viral oncogene homolog A (ras related) |
| | | SEQ ID NO: 131; SEQ ID NO: 300 |
| 124 | RARRES3 | retinoic acid receptor responder (tazarotene induced) 3 |
| | | SEQ ID NO: 132; SEQ ID NO: 301 |
| 125 | REST | RE1-silencing transcription factor |
| | | SEQ ID NO: 133; SEQ ID NO: 302 |
| 126 | RPL34 | ribosomal protein L34 |
| | | SEQ ID NO: 134; SEQ ID NO: 303 |
| 127 | RPL6 | ribosomal protein L6 |
| | | SEQ ID NO: 135; SEQ ID NO: 304 |
| 128 | S100A10 | S100 calcium binding protein A10 (annexin II ligand, calpactin |
| | | I, light polypeptide (p11)) |
| | | SEQ ID NO: 136; SEQ ID NO: 305 |
| 129 | S100P | S100 calcium binding protein P |
| | | SEQ ID NO: 137; SEQ ID NO: 306 |
| 130 | SCD | stearoyl-CoA desaturase (delta-9-desaturase) |
| | | SEQ ID NO: 25; SEQ ID NO: 194 |
| 131 | SCP2 | sterol carrier protein 2 |
| | | SEQ ID NO: 138; SEQ ID NO: 307 |
| 132 | SEC14L1 | SEC14-like 1 ( [symbol] ) |
| | | SEQ ID NO: 26; SEQ ID NO: 195 |
| 133 | SEC31L1 | SEC31-like 1 (S. cerevisiae) |
| | | SEQ ID NO: 139; SEQ ID NO: 308 |
| 134 | SEMA4C | sema domain, immunoglobulin domain (Ig), transmembrane |
| | | domain (TM) and short cytoplasmic domain, (semaphorin) 4C |
| | | SEQ ID NO: 140; SEQ ID NO: 309 |
| 135 | SERPINE1 | serine (or cysteine) proteinase inhibitor, clade E (nexin, |
| | | plasminogen activator inhibitor type 1), member 1 |
| | | SEQ ID NO: 141; SEQ ID NO: 310 |
| 136 | SFN | Stratifin |
| | | SEQ ID NO: 27; SEQ ID NO: 196 |
| 137 | SH3GL1 | SH3-domain GRB2-like 1 |
| | | SEQ ID NO: 28; SEQ ID NO: 197 |
| 138 | SIDT1 | SID1 transmembrane family, member 1 |
| | | SEQ ID NO: 142; SEQ ID NO: 311 |
| 139 | SLC35A1 | solute carrier family 35 (CMP-sialic acid transporter), member |
| | | A1 |
| | | SEQ ID NO: 143; SEQ ID NO: 312 |
| 140 | SLC35C1 | solute carrier family 35, member C1 |
| | | SEQ ID NO: 144; SEQ ID NO: 313 |
| 141 | SLC39A6 | solute carrier family 39 (zinc transporter), member 6 |
| | | SEQ ID NO: 145; SEQ ID NO: 314 |
| 142 | SLC4A7 | solute carrier family 4, sodium bicarbonate cotransporter, |
| | | member 7 |
| | | SEQ ID NO: 146; SEQ ID NO: 315 |
| 143 | SLC7A5 | solute carrier family 7 (cationic amino acid transporter, y+ |
| | | system), member 5 |
| | | SEQ ID NO: 147; SEQ ID NO: 316 |
| 144 | SMTN | Smoothelin |
| | | SEQ ID NO: 29; SEQ ID NO: 198 |
| 145 | STEAP1 | six transmembrane epithelial antigen of the prostate 1 |
| | | SEQ ID NO: 148; SEQ ID NO: 317 |
| 146 | TGFBI | transforming growth factor, beta-induced, 68 kDa |
| | | SEQ ID NO: 149; SEQ ID NO: 318 |
| 147 | TJAP1 | tight junction associated protein 1 (peripheral) |
| | | SEQ ID NO: 30; SEQ ID NO: 199 |
| 148 | TM2D3 | TM2 domain containing 3 |
| | | SEQ ID NO: 150; SEQ ID NO: 319 |
| 149 | TMEM59 | transmembrane protein 59 |
| | | SEQ ID NO: 151; SEQ ID NO: 320 |
| 150 | TMEM66 | transmembrane protein 66 |
| | | SEQ ID NO: 152; SEQ ID NO: 321 |
| 151 | TNRC6B | trinucleotide repeat containing 6B |
| | | SEQ ID NO: 153; SEQ ID NO: 322 |
| 152 | TPT1 | tumor protein, translationally-controlled 1 |
| | | SEQ ID NO: 154; SEQ ID NO: 323 |
| 153 | TRA2A | transformer-2 alpha |
| | | SEQ ID NO: 155; SEQ ID NO: 324 |
| 154 | TRFP | Trf (TATA binding protein-related factor)-proximal |
| | | homolog ( [symbol] ) SEQ ID NO: 31; SEQ ID NO: 200 |
| 155 | TRIB3 | tribbles homolog 3 (Drosophila) |
| | | SEQ ID NO: 156; SEQ ID NO: 325 |
| 156 | TSPAN15 | tetraspanin 15 |
| | | SEQ ID NO: 157; SEQ ID NO: 326 |
| 157 | TTC12 | tetratricopeptide repeat domain 12 |
| | | SEQ ID NO: 158; SEQ ID NO: 327 |
| 158 | TUSC4 | tumor suppressor candidate 4 |
| | | SEQ ID NO: 159; SEQ ID NO: 328 |
| 159 | UBE1L | ubiquitin-activating enzyme E1-like |
| | | SEQ ID NO: 160; SEQ ID NO: 329 |
| 160 | UBE2A | ubiquitin-conjugating enzyme E2A (RAD6 homolog) |
| | | SEQ ID NO: 161; SEQ ID NO: 330 |
| 161 | UBTF | upstream binding transcription factor, RNA polymerase I |
| | | SEQ ID NO: 162; SEQ ID NO: 331 |
| 162 | UCP2 | uncoupling protein 2 (mitochondrial, proton carrier) |
| | | SEQ ID NO: 163; SEQ ID NO: 332 |
| 163 | VDAC3 | voltage-dependent anion channel 3 |
| | | SEQ ID NO: 164; SEQ ID NO: 333 |
| 164 | VPS13B | vacuolar protein sorting 13B (yeast) |
| | | SEQ ID NO: 165; SEQ ID NO: 334 |
| 165 | WHSC1L1 | Wolf-Hirschhorn syndrome candidate 1-like 1 |
| | | SEQ ID NO: 166; SEQ ID NO: 335 |
| 166 | YIF1A | Yip1 interacting factor homolog A (S. cerevisiae) |
| | | SEQ ID NO: 167; SEQ ID NO: 336 |
| 167 | YTHDF1 | YTH domain family, member 1 |
| | | SEQ ID NO: 32; SEQ ID NO: 201 |
| 168 | ZNF207 | zinc finger protein 207 |
| | | SEQ ID NO: 168; SEQ ID NO: 337 |
| 169 | ZNF395 | zinc finger protein 395 |
| | | SEQ ID NO: 169; SEQ ID NO: 338 |

Genes common to both the classifiers generated from LM2 and MDA-MB-231 cells silenced for Fra1 expression

Genes with a higher centroid value in poor prognosis patients compared to good prognosis patients and that may be amenable drug targets are highlighted in bold. Fra1 (FOSL1) has also been included to this list.

TABLE 3
32 genes for which inhibitors are being claimed

| | Entrez | | Function |
|---|---|---|---|
| Symbol | ID | Gene Description | SEQ ID NO |
| ABHD11 | 83451 | abhydrolase domain | Hydrolase |
| | | containing 11 | SEQ ID NO :1 |
| ADORA2B | 136 | adenosine A2b receptor | G coupled receptor activity |
| | | | SEQ ID NO: 2 |
| AURKB | 9212 | aurora kinase B | protein serine/threonine kinase activity, |
| | | | transferase activity |
| | | | SEQ ID NO: 3 |
| BIRC5 | 332 | baculoviral IAP repeat- | caspase inhibitor activity, peptidase inhibitor |
| | | containing 5 (survivin) | activity |
| | | | SEQ ID NO: 4 |
| C22orf18 | 79019 | chromosome 22 open | condensed chromosome kinetochore |
| | | reading frame 18 | (component only) |
| | | | SEQ ID NO: 5 |
| CHAF1A | 10036 | chromatin assembly | chromatin binding |
| | | factor 1, subunit A (p150) | SEQ ID NO: 6 |
| CHML | 1122 | choroideremia-like (Rab | GTPase activiator activity |
| | | escort protein 2) | SEQ ID NO: 7 |
| D21S2056E | 8568 | DNA segment on | rRNA processing, component of |
| | | chromosome 21 (unique) | nucleus/nucleolus |
| | | 2056 expressed sequence | SEQ ID NO: 8 |
| E2F1 | 1869 | E2F transcription factor 1 | transcription activator/transcription |
| | | | corepressor/transcription factor activity |
| | | | SEQ ID NO: 9 |
| EZH2 | 2146 | enhancer of zeste | methyl transferase/transferase activity |
| | | homolog 2 (Drosophila) | SEQ ID NO: 10 |
| FEN1 | 2237 | flap structure-specific | 5′flap endonuclease/5′-3′ exonuclease activity, |
| | | endonuclease 1 | hydrolyase activity |
| | | | SEQ ID NO: 11 |
| FOSL1 | 8061 | FOS-like antigen 1 | transcription activator/transcription factor |
| | | | activity |
| | | | SEQ ID NO: 12 |
| FOXM1 | 2305 | forkhead box M1 | transcription factor activity |
| | | | SEQ ID NO: 13 |
| H2AFZ | 3015 | H2A histone family, | DNA binding |
| | | member Z | SEQ ID NO: 14 |
| IGFBP3 | 3486 | insulin-like growth factor | insulin like growth factor I binding, protein |
| | | binding protein 3 | tyrosine phosphatase activity |
| | | | SEQ ID NO: 15 |
| MCM10 | 55388 | MCM10 | protein binding, metal ion binding |
| | | minichromosome | SEQ ID NO: 16 |
| | | maintenance deficient 10 | |
| | | (S. cerevisiae) | |
| MCM2 | 4171 | MCM2 minichromosome | ATP binding/DNA binding/DNA replication |
| | | maintenance deficient 2, | origin binding/protein binding |
| | | mitotin (S. cerevisiae) | SEQ ID NO: 17 |
| MTDH | 92140 | metadherin | NF-kappaB binding/protein binding |
| | | | SEQ ID NO: 18 |
| PAICS | 10606 | phosphoribosylaminoimidazole | ATP binding/ligase, lyase activity |
| | | carboxylase, | SEQ ID NO: 19 |
| | | phosphoribosylaminoimidazole | |
| | | succinocarboxamide | |
| | | synthetase | |
| PCOLN3 | 5119 | procollagen (type III) N- | metallopeptidase activity, zinc ion binding |
| | | endopeptidase | SEQ ID NO: 20 |
| PHLDA1 | 22822 | pleckstrin homology-like | protein binding/apoptosis |
| | | domain, family A, member 1 | SEQ ID NO: 21 |
| PPP2R3A | 5523 | protein phosphatase 2 | protein phosphatase 2A regulator activity, |
| | | (formerly 2A), regulatory | protein binding activity |
| | | subunit B″, alpha | SEQ ID NO: 22 |
| PTGES | 9536 | prostaglandin E synthase | isomerase activity, prostaglandinE synthase |
| | | | activity |
| | | | SEQ ID NO: 23 |
| PTP4A1 | 7803 | protein tyrosine | hydrolase/protein tyrosine phosphatase |
| | | phosphatase type IVA, | activity |
| | | member 1 | SEQ ID NO: 24 |
| SCD | 6319 | stearoyl-CoA desaturase | oxidoreductase activity/iron ion binding |
| | | (delta-9-desaturase) | SEQ ID NO: 25 |
| SEC14L1 | 6397 | SEC14-like 1 | intracellular transport system |
| | | (S. cerevisiae) | SEQ ID NO: 26 |
| SFN | 2810 | stratifin | protein kinase C inhibitor |
| | | | SEQ ID NO: 27 |
| SH3GL1 | 6455 | SH3-domain GRB2-like 1 | lipid binding/protein binding |
| | | | SEQ ID NO: 28 |
| SMTN | 6525 | smoothelin | actin binding/structural constituent of muscle |
| | | | SEQ ID NO: 29 |
| TJAP1 | 93643 | tight junction associated | protein binding |
| | | protein 1 (peripheral) | SEQ ID NO: 30 |
| TRFP | 9477 | Trf (TATA binding | RNA polymerase II transcription mediator/ |
| | | protein-related factor)- | RNA polymerase activity, protein binding |
| | | proximal homolog | SEQ ID NO: 31 |
| | | (Drosophila) | |
| YTHDF1 | 54915 | YTH domain family, | Unknown |
| | | member 1 | SEQ ID NO: 32 |

TABLE 4
known inhibitors from genes of Table 3

| | Whole name/ | | |
|---|---|---|---|
| Gene | Protein | Inhibitors | Description |
| AURKB | Aurora kinase B | AZD1152 | selective inhibitor |
| | | | http://www.selleckchem.com/Product.asp?ClassID=46 |
| | | Hesperadin | small molecule, Boehringer Ingelheim, |
| | | (HESP) | http://www.boehringer-ingelheim.com |
| | | Z(M/W)447439 | small molecule |
| | | | http://www.selleckchem.com/Product.asp?ClassID=46 |
| | | VX-680 | http://www.selleckchem.com/Product.asp?ClassID=46 |
| | | PHA739358 | http://www.selleckchem.com/Product.asp?ClassID=46 |
| | | MLN8054 | http://www.selleckchem.com/Product.asp?ClassID=46 |
| ADORA2B | Adenosine A2b | PSB1115 | all and a few more are available at |
| | receptor | | http://www.tocris.com/and www.biocompare.com |
| | | CGS15943 | |
| | | DPCPX | |
| | | PSB601 | specific antagonist |
| | | SCH58261 | |
| | | 7-Chloro-4-hydroxy- | |
| | | 2-phenyl-1,8- | |
| | | naphthyridine* | |
| | | CGS-15953* | |
| BIRC5 | Survivin | LY2181308 | antisense molecule, specific (Eli Lilliy and Company, |
| | | (ISIS23722) | Indianapolis, IN) |
| | | YM155 | transcriptional repressor, in clinical development by |
| | | | Astellas Pharma, Inc. |
| | | EM1421 | transcriptional represser, Erimos Pharmaceuiticals |
| | | (Terameprocol) | |
| | | SPC3042 | antisense molecule designed by Hansen, Fisker, |
| | | | Westergaar et al. 2008 |
| | | EZN3042 | developed by Enzon Pharmaceuticals and Santaris |
| | | | Pharma Advances |
| | | Oxaliplatin | |
| E2F1 | E2F transcription | Mitoxantrane | alters the consensus DNA binding site (also works for |
| | factor 1 | | Sp1) |
| | | Distamycin | specifically inhibits E2F1-DNA complex |
| | | MGT-6a | microgonotropen |
| FOXM1 | Forkhead box M1 | Siomycin A | thiazole antibiotic |
| | | MG115 | proteosome inhibitor (www.biocompare.com) |
| | | MG132 | proteosome inhibitor (www.tocris.com) |
| | | Bortezomib | proteosome inhibitor |
| | | Thiostrepton | thiazole antibiotic (www.tocris.com) |
| PCOLN3 | procollagen | TIMP3 | also inhibits MMPs, ADAMs, ADAMTS4, 5 and |
| | (type III) | | VEGF-VEGFR interaction (www.biocompare.com) |
| | N-endopeptidase | | |
| | (ADAMTS-2) | α2-macroglobulin | http://www.enzolifesciences.com/BML- |
| | | | SE502/alpha2-macroglobulin-human-purified/ |
| PPP2R3A | protein phosphatase2 | Calyculin A | high potency for PP2A, low potency for PP1 |
| | (2A), regulatory | | |
| | subunit B, alpha | | |
| | (PP2A) | Cantharidic acid | inhibits PP2A and PP1 (for use in protein purification) |
| | | Candharidin | selective inhibitor of PP2A |
| | | Endothall | intermediate potency for PP2A |
| | | Microcystin LR | more potent for PP2A when compared to PP1 |
| | | Okadaic acid | completely inhibits PP2A at 1 nM (less potent for PP1) |
| | | Toutomycin | more potent for PP1, less for PP2A |
| | | Fostriecin sodium | potent inhibitors for PP2A and PP4 |
| | | salt | |
| PTP4A1 | Protein tyrosine | Pentamidine | inhibits all PRLs |
| | phosphatase type | | |
| | IVA, member 1 | | |
| | (PRL1) | | |
| SCD | Stearoyl-CoA | 4a (CVT-11563) | Koltun, Vasilevich, Parkhill, 2009 |
| | desaturase | | |
| | (delta-9- desaturase) | CVT-11127 | |
| | | 9-thiastearate | |
| SFN | Stratifin | R18 peptide | isoform independent inhibitor, antagonist |
| | (14-3-3 sigma) | | |
| EZH2 | Enhancer of zeste | 3-Deazaneplanocin | also induces SUZ12 degradation |
| | homolog 2 | A (DZNep) | |
| | | Isoliquiritigenin | |

*In an in vitro drug screen with the LOPAC library, we identified those two ADORA2B inhibitors as being selectively cytotoxic for breast cancer cells expressing high levels of Fra-1.

TABLE 5
clustering of the 32 genes from which inhibitors are being claimed

| | | SEQ ID NO of the |
|---|---|---|
| Cluster | Gene name | human cDNA |
| Enzymes | ABHD11, AURKB, CHML, | 1, 3, 7, 10, |
| | EZH2, FEN1, IGFBP3, | 11, 15, 19, 20, |
| | PAICS, PCOLN3, PPP2R3A, | 22, 23, 24,25 |
| | PTGES, PTP4A1, SCD | |
| Transcription factor | E2F1, FOSL1, FOXM1 | 9, 12, 13 |
| Structural proteins | C22orf18, CHAF1A, H2AFZ, | 5, 6, 14, 29, |
| | SMTN, TJAP1, D21S2056E | 30, 8 |
| receptor | ADORA2B | 2 |
| Adhesion molecule | MTDH | 18 |
| Apoptose inhibitor | BIRC5, PHLDA1 | 4, 21 |
| DNAreplication/ | MCM10, MCM2, TRFP | 16, 17, 31 |
| transcription | | |
| Remaining genes: | SEC14L1, SFN, SH3GL1, | 26, 27, 28, 32 |
| no cluster | YTHDF1 | |

Underlined genes are preferred.

TABLE 6
12 Fra-1-regulated genes essential for metastasis

| HGNC Symbol | Gene Description |
|---|---|
| ABHD11 | abhydrolase domain containing 11 |
| ADORA2B | adenosine A2b receptor |
| D21S2056E | DNA segment on chromosome 21 (unique) 2056 |
| | expressed sequence (also known as ribosomal |
| | RNA processing 1 homolog (RRP1) (S. cerevisiae); |
| | NNP-1; NOP52; RRP1A) |
| E2F1 | E2F transcription factor 1 |
| EZH2 | enhancer of zeste homolog 2 |
| IGFBP3 | insulin-like growth factor binding protein 3 |
| PAICS | phosphoribosylaminoimidazole carboxylase, |
| | phosphoribosylaminoimidazole |
| | succinocarboxamide synthetase |
| PPP2R3A | protein phosphatase 2 (formerly 2A), regulatory |
| | subunit B″, alpha |
| PTGES | prostaglandin E synthase |
| PTP4A1 | protein tyrosine phosphatase type IVA, member 1 |
| SFN | stratifin |
| SH3GL1 | SH3-domain GRB2-like 1 |

Twelve genes for which shRNA-mediated silencing in LM2 cells significantly inhibited lung metastasis formation.

### REFERENCES

[0211] Adiseshaiah, P., Lindner, D. J., Kalvakolanu, D. V., and Reddy, S. P. (2007). FRA-1 Proto-Oncogene Induces Lung Epithelial Cell Invasion and Anchorage-Independent Growth In vitro, but Is Insufficient to Promote Tumor Growth In vivo. Cancer Res 67, 6204-6211.
[0212] Adjei, A. A., Cohen, R. B., Franklin, W., Morris, C., Wilson, D., Molina, J. R., Hanson, L. J., Gore, L., Chow, L., Leong, S., et al. (2008). Phase I Pharmacokinetic and Pharmacodynamic Study of the Oral, Small-Molecule Mitogen-Activated Protein Kinase Kinase ½ Inhibitor AZD6244 (ARRY-142886) in Patients With Advanced Cancers. J Clin Oncol 26, 2139-2146.
[0213] Andersen, H., Mejlvang, J., Mahmood, S., Gromova, I., Gromov, P., Lukanidin, E., Kriajevska, M., Mellon, J. K., and Tulchinsky, E. (2005) Immediate and Delayed Effects of E-Cadherin Inhibition on Gene Regulation and Cell Motility in Human Epidermoid Carcinoma Cells. Mol Cell Biol 25, 9138-9150.
[0214] Ansieau, S., Bastid, J., Doreau, A., Morel, A.-P., Bouchet, B. P., Thomas, C., Fauvet, F., Puisieux, I., Doglioni, C., Piccinin, S., et al. (2008). Induction of EMT by Twist Proteins as a Collateral Effect of Tumor-Promoting Inactivation of Premature Senescence. Cancer Cell 14, 79-89.
[0215] Belguise, K., Kersual, N., Galtier, F., and Chalbos, D. (2005). FRA-1 expression level regulates proliferation and invasiveness of breast cancer cells. Oncogene 24, 1434-1444.
[0216] Bernards, R., and Weinberg, R. A. (2002). Metastasis genes: A progression puzzle. Nature 418, 823-823.
[0217] Blamey, R. W., Ellis, I. O., Pinder, S. E., Lee, A. H. S., Macmillan, R. D., Morgan, D. A. L., Robertson, J. F. R., Mitchell, M. J., Ball, G. R., Haybittle, J. L., and Elston, C. W. (2007). Survival of invasive breast cancer according to the Nottingham Prognostic Index in cases diagnosed in 1990-1999. European Journal of Cancer 43, 1548-1555.
[0218] Brummelkamp, T. R., Bernards, R., and Agami, R. (2002). Stable suppression of tumorigenicity by virus-mediated RNA interference. Cancer Cell 2, 243-247.
[0219] Carter, B. D., Zirrgiebel, U., and Barde, Y.-A. (1995). Differential Regulation of p21ras Activation in Neurons by Nerve Growth Factor and Brain-derived Neurotrophic Factor. J Biol Chem 270, 21751-21757.
[0220] Cavallaro, U., and Christofori, G. (2004). Cell adhesion and signalling by cadherins and Ig-CAMs in cancer. Nat Rev Cancer 4, 118-132.
[0221] Chin, K., DeVries, S., Fridlyand, J., Spellman, P. T., Roydasgupta, R., Kuo, W.-L., Lapuk, A., Neve, R. M., Qian, Z., Ryder, T., et al. (2006). Genomic and transcriptional aberrations linked to breast cancer pathophysiologies. Cancer Cell 10, 529-541.
[0222] Christofori, G. (2006). New signals from the invasive front. Nature 441, 444-450.
[0223] Desmedt, C., Piette, F., Loi, S., Wang, Y., Lallemand, F., Haibe-Kains, B., Viale, G., Delorenzi, M., Zhang, Y., d'Assignies, M. S., et al. (2007). Strong Time Dependence of the 76-Gene Prognostic Signature for Node-Negative Breast Cancer Patients in the TRANSBIG Multicenter Independent Validation Series. Clin Cancer Res 13, 3207-3214.
[0224] Desmet, C., Gosset, P., Pajak, B., Cataldo, D., Bentires-Alj, M., Lekeux, P., and Bureau, F. (2004). Selective Blockade of NF-{kappa}B Activity in Airway Immune Cells Inhibits the Effector Phase of Experimental Asthma. J Immunol 173, 5766-5775.
[0225] Douma, S., van Laar, T., Zevenhoven, J., Meuwissen, R., van Garderen, E., and Peeper, D. S. (2004). Suppression of anoikis and induction of metastasis by the neurotrophic receptor TrkB. Nature 430, 1034-1039.
[0226] Dunkler, D., Michiels, S., and Schemper, M. (2007). Gene expression profiling: Does it add predictive accuracy to clinical characteristics in cancer prognosis? European Journal of Cancer 43, 745-751.
[0227] Eferl, R., and Wagner, E. F. (2003). AP-1: a double-edged sword in tumorigenesis. Nat Rev Cancer 3, 859-868.
[0228] Eifel, P., Axelson, J. A., Costa, J., Crowley, J., Curran, W. J. J., Deshler, A., Fulton, S., Hendricks, C. B., Kemeny, M., Kornblith, A. B., et al. (2001). National Institutes of Health Consensus Development Conference Statement: Adjuvant Therapy for Breast Cancer, Nov. 1-3, 2000. J Natl Cancer Inst 93, 979-989.
[0229] Fidler, I. J. (2003). The pathogenesis of cancer metastasis: the ‘seed and soil’ hypothesis revisited. Nat Rev Cancer 3, 453-458.
[0230] Geiger, T. R., and Peeper, D. S. (2005). The Neurotrophic Receptor TrkB in Anoikis Resistance and Metastasis: A Perspective. Cancer Res 65, 7033-7036.
[0231] Goldhirsch, A., Wood, W. C., Gelber, R. D., Coates, A. S., Thurlimann, B., Senn, H. J., and Panel, M. (2007). Progress and promise: highlights of the international expert consensus on the primary therapy of early breast cancer 2007. Ann Oncol 18, 1133-1144.
[0232] Gupta, G. P., and Massague, J. (2006). Cancer Metastasis: Building a Framework. Cell 127, 679-695.
[0233] Hu, G., Chong, R. A., Yang, Q., Wei, Y., Blanco, M. A., Li, F., Reiss, M., Au, J. L., Haffty, B. G. and Kang, Y. (2009). MTDH activation by 8q22 genomic gain promotes chemoresistance and metastasis of poor-prognosis breast cancer. Cancer Cell 15, 9-20.
[0234] Hugo, H., Ackland, M. L., Blick, T., Lawrence, M. G., Clements, J. A., Williams, E. D., and Thompson, E. W. (2007). Epithelial-mesenchymal and mesenchymal-epithelial transitions in carcinoma progression. Journal of Cellular Physiology 213, 374-383.
[0235] Ivanova, N., Dobrin, R., Lu, R., Kotenko, I., Levorse, J., DeCoste, C., Schafer, X., Lun, Y., and Lemischka, I. R. (2006). Dissecting self-renewal in stem cells with RNA interference. Nature 442, 533-538.
[0236] Liotta, L. A., and Kohn, E. (2004). Anoikis: Cancer and the homeless cell. Nature 430, 973-974.
[0237] Loi, S., Haibe-Kains, B., Desmedt, C., Lallemand, F., Tutt, A. M., Gillet, C., Ellis, P., Harris, A., Bergh, J., Foekens, J. A., et al. (2007). Definition of Clinically Distinct Molecular Subtypes in Estrogen Receptor-Positive Breast Carcinomas Through Genomic Grade. J Clin Oncol 25, 1239-1246.
[0238] Lusa, L., Miceli, R., and Mariani, L. (2007). Estimation of predictive accuracy in survival analysis using R and S-PLUS. Computer Methods and Programs in Biomedicine 87, 132-137.
[0239] Mani, S. A., Guo, W., Liao, M.-J., Eaton, E. N., Ayyanan, A., Zhou, A. Y., Brooks, M., Reinhard, F., Zhang, C. C., Shipitsin, M., et al. (2008). The Epithelial-Mesenchymal Transition Generates Cells with Properties of Stem Cells. Cell 133, 704-715.
[0240] Milde-Langosch, K. (2005). The Fos family of transcription factors and their role in tumourigenesis. European Journal of Cancer 41, 2449-2461.
[0241] Miller, L. D., Smeds, J., George, J., Vega, V. B., Vergara, L., Ploner, A., Pawitan, Y., Hall, P., Klaar, S., Liu, E. T., and Bergh, J. (2005). An expression signature for p53 status in human breast cancer predicts mutation status, transcriptional effects, and patient survival. PNAS 102, 13550-13555.
[0242] Minn, A. J., Gupta, G. P., Siegel, P. M., Bos, P. D., Shu, W., Giri, D. D., Viale, A., Olshen, A. B., Gerald, W. L., and Massague, J. (2005). Genes that mediate breast cancer metastasis to lung. Nature 436, 518-524.
[0243] Ozanne, B. W., Spence, H. J., McGarry, L. C., and Hennigan, R. F. (2006). Transcription factors control invasion: AP-1 the first among equals. Oncogene 26, 1-10.
[0244] Pawitan, Y., Bjohle, J., Amler, L., Borg, A.-L., Egyhazi, S., Hall, P., Han, X., Holmberg, L., Huang, F., Klaar, S., et al. (2005). Gene expression profiling spares early breast cancer patients from adjuvant therapy: derived and validated in two population-based cohorts. Breast Cancer Research 7, R953-R964.
[0245] Ramaswamy, S., Ross, K. N., Lander, E. S., and Golub, T. R. (2003). A molecular signature of metastasis in primary solid tumors. Nat Genet. 33, 49-54.
[0246] Ramos-Nino, M. E., Timblin, C. R., and Mossman, B. T. (2002). Mesothelial Cell Transformation Requires Increased AP-1 Binding Activity and ERK-dependent Fra-1 Expression. Cancer Res 62, 6065-6069.
[0247] Ravdin, P. M., Siminoff, L. A., Davis, G. J., Mercer, M. B., Hewlett, J., Gerson, N., and Parker, H. L. (2001). Computer Program to Assist in Making Decisions About Adjuvant Therapy for Women With Early Breast Cancer. J Clin Oncol 19, 980-991.
[0248] Schemper, M., and Henderson, R. (2000). Predictive accuracy and explained variation in Cox regression. Biometrics 56, 249-255.
[0249] Thiery, J. P., and Sleeman, J. P. (2006). Complex networks orchestrate epithelial-mesenchymal transitions. Nat Rev Mol Cell Biol 7, 131-142.
[0250] Vallone, D., Battista, S., Pierantoni, G. M., Fedele, M., Casalino, L., Santoro, M., Viglietto, G., Fusco, A., and Verde, P. (1997). Neoplastic transformation of rat thyroid cells requires the junB and fra-1 gene induction which is dependent on the HMGI-C gene product. EMBO J. 16, 5310-5321.
[0251] van 't Veer, L. J., and Bernards, R. (2008). Enabling personalized cancer medicine through analysis of gene-expression patterns. Nature 452, 564-570.
[0252] van de Vijver, M. J., He, Y. D., van 't Veer, L. J., Dai, H., Hart, A. A. M., Voskuil, D. W., Schreiber, G. J., Peterse, J. L., Roberts, C., Marton, M. J., et al. (2002). A Gene-Expression Signature as a Predictor of Survival in Breast Cancer. N Engl J Med 347, 1999-2009.
[0253] Vial, E., Sahai, E., and Marshall, C. J. (2003). ERK-MAPK signaling coordinately regulates activity of Rac1 and RhoA for tumor cell motility. Cancer Cell 4, 67-79.
[0254] Yang, J., Mani, S. A., Donaher, J. L., Ramaswamy, S., Itzykson, R. A., Come, C., Savagner, P., Gitelman, I., Richardson, A., and Weinberg, R. A. (2004). Twist, a Master Regulator of Morphogenesis, Plays an Essential Role in Tumor Metastasis. Cell 117, 927-939.
[0255] Yang, J., and Weinberg, R. A. (2008). Epithelial-Mesenchymal Transition: At the Crossroads of Development and Tumor Metastasis. Developmental Cell 14, 818-829.
[0256] Zajchowski, D. A., Bartholdi, M. F., Gong, Y., Webster, L., Liu, H.-L., Munishkin, A., Beauheim, C., Harvey, S., Ethier, S. P., and Johnson, P. H. (2001). Identification of Gene Expression Profiles That Predict the Aggressive Behavior of Breast Cancer Cells. Cancer Res 61, 5168-5178.

The application's sequence listing, which the Patent Office published only in electronic form, follows.

SEQUENCE LISTING (392 sequences)

SEQ ID NO: 1 - skipped

SEQ ID NO: 2 - DNA, 1885 bp, Homo sapiens
gggcaatttgttagttatccgccgccaccaagacgcggcacggcgcctggaccggaggggccccgcgcgggcgcgaactttgggctcgggcgagtgggtggtgctccgcccagcccgagacgggcgggcgcgcgggccaatgggtgccgcctcttggccgcggggggccccgacccgtgggtcccggccaccagcgccccagccccgaggctcagaagcggcaggcggaggcgcggtccgggcgctatggccatgcccggcgggtctcacgcggctgcccctcgcccggcgcgccttcggtagggggcgcccggggcccagctggcccggccatgctgctggagacacaggacgcgctgtacgtggcgctggagctggtcatcgccgcgctttcggtggcgggcaacgtgctggtgtgcgccgcggtgggcacggcgaacactctgcagacgcccaccaactacttcctggtgtccctggctgcggccgacgtggccgtggggctcttcgccatcccctttgccatcaccatcagcctgggcttctgcactgacttctacggctgcctcttcctcgcctgcttcgtgctggtgctcacgcagagctccatcttcagccttctggccgtggcagtcgacagatacctggccatctgtgtcccgctcaggtataaaagtttggtcacggggacccgagcaagaggggtcattgctgtcctctgggtccttgcctttggcatcggattgactccattcctggggtggaacagtaaagacagtgccaccaacaactgcacagaaccctgggatggaaccacgaatgaaagctgctgccttgtgaagtgtctctttgagaatgtggtccccatgagctacatggtatatttcaatttctttgggtgtgttctgcccccactgcttataatgctggtgatctacattaagatcttcctggtggcctgcaggcagcttcagcgcactgagctgatggaccactcgaggaccaccctccagcgggagatccatgcagccaagtcactggccatgattgtggggatttttgccctgtgctggttacctgtgcatgctgttaactgtgtcactcttttccagccagctcagggtaaaaataagcccaagtgggcaatgaatatggccattcttctgtcacatgccaattcagttgtcaatcccattgtctatgcttaccggaaccgagacttccgctacacttttcacaaaattatctccaggtatcttctctgccaagcagatgtcaagagtgggaatggtcaggctggggtacagcctgctctcggtgtgggcctatgatctaggctctcgcctcttccaggagaagatacaaatccacaagaaacaaagaggacacggctggttttcattgtgaaagatagctacacctcacaaggaaatggactgcctctcttgagcacttccctggagctaccacgtatctagctaatatgtatgtgtcagtagtaggctccaaggattgacaaatatatttatgatctattcagctgcttttactgtgtggattatgccaacagcttgaatggattctaacagactcttttgtttttaaaagtctgccttgtttatggtggaaaattactgaaactattttactgtgaaacagtgtgaactattataatgcaaatactttttaacttagaggcaatggaaaaataaaagttgactgtactaaaaatgtatacttgttgccaggaaggtgacctcaaaaattaaaagtataattattcggccgggcatggtggctcacacctgtaattccagcactttgggaggccaaggcaggcggatcacgaggtcaggagttcaaaaccagcctgtccaatatagtg

SEQ ID NO: 3 - DNA, 1245 bp, Homo sapiens
cagattcagttgtttgcgggcggccgggagagtagcagtgccttggaccccagctctcctccccctttctctctaaggatggcccagaaggagaactcctacccctggccctacggccgacagacggctccatctggcctgagcaccctgccccagcgagtcctccggaaagagcctgtcaccccatctgcacttgtcctcatgagccgctccaatgtccagcccacagctgcccctggccagaaggtgatggagaatagcagtgggacacccgacatcttaacgcggcacttcacaattgatgactttgagattgggcgtcctctgggcaaaggcaagtttggaaacgtgtacttggctcgggagaagaaaagccatttcatcgtggcgctcaaggtcctcttcaagtcccagatagagaaggagggcgtggagcatcagctgcgcagagagatcgaaatccaggcccacctgcaccatcccaacatcctgcgtctctacaactatttttatgaccggaggaggatctacttgattctagagtatgccccccgcggggagctctacaaggagctgcagaagagctgcacatttgacgagcagcgaacagccacgatcatggaggagttggcagatgctctaatgtactgccatgggaagaaggtgattcacagagacataaagccagaaaatctgctcttagggctcaagggagagctgaagattgctgacttcggctggtctgtgcatgcgccctccctgaggaggaagacaatgtgtggcaccctggactacctgcccccagagatgattgaggggcgcatgcacaatgagaaggtggatctgtggtgcattggagtgctttgctatgagctgctggtggggaacccaccctttgagagtgcatcacacaacgagacctatcgccgcatcgtcaaggtggacctaaagttccccgcttccgtgcccatgggagcccaggacctcatctccaaactgctcaggcataacccctcggaacggctgcccctggcccaggtctcagcccacccttgggtccgggccaactctcggagggtgctgcctccctctgcccttcaatctgtcgcctgatggtccctgtcattcactcgggtgcgtgtgtttgtatgtctgtgtatgtataggggaaagaagggatccctaactgttcccttatctgttttctacctcctcctttgtttaataaaggctgaagctttttgt

SEQ ID NO: 4 - DNA, 2699 bp, Homo sapiens
cccagaaggccgcggggggtggaccgcctaagagggcgtgcgctcccgacatgccccgcggcgcgccattaaccgccagatttgaatcgcgggacccgttggcagaggtggcggcggcggcatgggtgccccgacgttgccccctgcctggcagccctttctcaaggaccaccgcatctctacattcaagaactggcccttcttggagggctgcgcctgcaccccggagcggatggccgaggctggcttcatccactgccccactgagaacgagccagacttggcccagtgtttcttctgcttcaaggagctggaaggctgggagccagatgacgaccccattgggccgggcacggtggcttacgcctgtaataccagcactttgggaggccgaggcgggcggatcacgagagaggaacataaaaagcattcgtccggttgcgctttcctttctgtcaagaagcagtttgaagaattaacccttggtgaatttttgaaactggacagagaaagagccaagaacaaaattgcaaaggaaaccaacaataagaagaaagaatttgaggaaactgcggagaaagtgcgccgtgccatcgagcagctggctgccatggattgaggcctctggccggagctgcctggtcccagagtggctgcaccacttccagggtttattccctggtgccaccagccttcctgtgggccccttagcaatgtcttaggaaaggagatcaacattttcaaattagatgtttcaactgtgctcttgttttgtcttgaaagtggcaccagaggtgcttctgcctgtgcagcgggtgctgctggtaacagtggctgcttctctctctctctctcttttttgggggctcatttttgctgttttgattcccgggcttaccaggtgagaagtgagggaggaagaaggcagtgtcccttttgctagagctgacagctttgttcgcgtgggcagagccttccacagtgaatgtgtctggacctcatgttgttgaggctgtcacagtcctgagtgtggacttggcaggtgcctgttgaatctgagctgcaggttccttatctgtcacacctgtgcctcctcagaggacagtttttttgttgttgtgtttttttgtttttttttttttggtagatgcatgacttgtgtgtgatgagagaatggagacagagtccctggctcctctactgtttaacaacatggctttcttattttgtttgaattgttaattcacagaatagcacaaactacaattaaaactaagcacaaagccattctaagtcattggggaaacggggtgaacttcaggtggatgaggagacagaatagagtgataggaagcgtctggcagatactccttttgccactgctgtgtgattagacaggcccagtgagccgcggggcacatgctggccgctcctccctcagaaaaaggcagtggcctaaatcctttttaaatgacttggctcgatgctgtgggggactggctgggctgctgcaggccgtgtgtctgtcagcccaaccttcacatctgtcacgttctccacacgggggagagacgcagtccgcccaggtccccgctttctttggaggcagcagctcccgcagggctgaagtctggcgtaagatgatggatttgattcgccctcctccctgtcatagagctgcagggtggattgttacagcttcgctggaaacctctggaggtcatctcggctgttcctgagaaataaaaagcctgtcatttcaaacactgctgtggaccctactgggtttttaaaatattgtcagtttttcatcgtcgtccctagcctgccaacagccatctgcccagacagccgcagtgaggatgagcgtcctggcagagacgcagttgtctctgggcgcttgccagagccacgaaccccagacctgtttgtatcatccgggctccttccgggcagaaacaactgaaaatgcacttcagacccacttatttctgccacatctgagtcggcctgagatagacttttccctctaaactgggagaatatcacagtggtttttgttagcagaaaatgcactccagcctctgtactcatctaagctgcttatttttgatatttgtgtcagtctgtaaatggatacttcactttaataactgttgcttagtaattggctttgtagagaagctggaaaaaaatggttttgtcttcaactcctttgcatgccaggcggtgatgtggatctcggcttctgtgagcctgtgctgtgggcagggctgagctggagccgcccctctcagcccgcctgccacggcctttccttaaaggccatccttaaaaccagaccctcatggctaccagcacctgaaagcttcctcgacatctgttaataaagccgtaggcccttgtctaagtgcaaccgcctagactttctttcagatacatgtccacatgtccatttttcaggttctctaagttggagtggagtctgggaagggttgtgaatgaggcttctgggctatgggtgaggttccaatggcaggttagagcccctcgggccaactgccatcctggaaagtagagacagcagtgcccgctgcccagaagagaccagcaagccaaactggagcccccattgcaggctgtcgccatgtggaaagagtaactcacaattgccaataaagtctcatgtggttttatct

SEQ ID NO: 5 - DNA, 1002 bp, Homo sapiens
gtgcccacaggcctgcagcgggtccaaacctcaggcccccagcccgtgccgcttcgcggggtccacttctcgggaaatgtcctccgagccgcctgctggcggtgtcccgatccccccgggagtgggtcgaagggccaggccctccccagggggtgctgtgcctagggctcgactgtccgctctctctccctgcgcagctggtgggcacggaggatgctcttctgcagcagctggcggactcgatgctcaaagaggactgcgcctccgagctgaaggtccacttggcaaagtccctccctttgccctccagtgtgaatcggccccgaattgacctgatcgtgtttgtggttaatcttcacagcaaatacagtctccagaacacagaggagtccctgcgccatgtggatgccagcttcttcttggggaaggtgtgtttcctcgccacaggtgctgggcgggagagccactgcagcattcaccggcacaccgtggtgaagctggcccacacctatcaaagccccctgctctactgtgacctggaggtggaaggctttagggccaccatggcgcagcgcctggtgcgcgtgctgcagatctgtgctggccacgtgcccggtgtctcagctctgaacctgctgtccctgctgagaagctctgagggcccctccctggaggacctgtgagggtggctggcccctgggctgccccttctcatggcttcgtgctgactccataaacattctctgttgaggatgtccagtcagggcttgacaggcccaggctcagcccgccgtggctgggaaggttccctgcagtgccagtgctgcagcagggagagctgggcagaagcagcgagggggcccagctggcgagactgtagccccctcccactcccacactcactcttgcagagcctgtgtctttaagcagctggcgtgttacatctccatttaaggtttcctttgaacaaaaggtctgtggctaaaaaaagtttaaaaatca

SEQ ID NO: 6 - DNA, 3343 bp, Homo sapiens
gcggcagcagcggcgcgggcgggagggcgaagagcagcggccgcctgaggggagcccgcgcctccgccgcctgagaggaggtcgagctgccgccggggcgatgctggaggagctggagtgcggggcgcccggcgccaggggagccgccacagccatggattgcaaagatagaccagcttttccagttaagaagttaatacaagcccgtctgccgtttaagcgcctgaatcttgtcccaaaggggaaagccgatgacatgtcagacgatcagggtacttctgtgcaaagtaaaagccccgatttagaggcctctttggacaccttggaaaacaactgtcatgtgggttctgacatagactttagaccgaaacttgtcaacgggaagggtcccttagataactttttaagaaatagaatcgaaaccagtattggccagagcacagtcatcattgatttgacagaggactcgaatgagcagccagacagtcttgtggaccacaataaactaaattctgaagcctctccctccagggaggcaataaatggccagcgagaagacactggggatcagcaggggttgttgaaggccattcagaacgacaagttggcatttcctggagagaccctttcagacattccttgcaaaacagaggaggagggtgttggctgtggaggtgcagggaggagaggcgactcccaggaatgttcgccacggagctgcccggagctgacgagtggcccgagaatgtgccccagaaaggagcaggacagttggagtgaagctgggggcatcctgttcaaagggaaggtgcctatggtggtcttgcaggacatcttggctgtgagaccaccgcaaatcaagtcccttccagccacaccccaaggcaagaacatgacccctgagagtgaggtgctggaatctttccccgaagaagactctgtactcagccattcgtccctgagctctccctcttccaccagctcgcccgaggggccgcctgctcccccaaagcagcacagcagtaccagtcccttccccacctccacgcccctccgcagaataactaagaaattcgtcaaaggctctacagagaagaacaagctcagactgcaaagagatcaggagcgtctgggcaagcagctcaagttacgtgcagaaagggaagaaaaggagaagctgaaagaggaggccaagcgggccaaggaggaggccaagaagaagaaggaggaagagaaggagcttaaggaaaaggagaggcgggagaagcgggagaaggatgagaaggagaaggcggagaagcagcggctcaaggaggagcggcgcaaggagagacaggaagccctggaggctaaacttgaggaaaaaaggaaaaaggaagaagagaaacggttaagagaagaagagaagcgcattaaagcagagaaggccgaaatcacgaggttcttccagaaaccaaagactccacaggcccccaagaccctggccggctcctgtgggaagtttgccccctttgaaattaaagagcacatggtcctggcccctcggcgtcggaccgctttccatccagacctctgcagtcagctggaccagctcctccagcagcagagcggcgagttctccttcttgaaagacctcaaaggccggcagcccctgaggtccggacccacgcacgtttccacccggaatgcagatatttttaacagtgatgtcgtcatcgtggagcgtgggaagggcgacggtgttcccgagaggaggaagtttggcaggatgaagctcctgcagttctgtgagaaccaccggcctgcctactggggtacctggaataagaagacggcactcatccgcgcgcgagacccctgggcccaggacacgaagctcctggactatgaggtggacagtgatgaggagtgggaagaagaggagcctggggagtccctgtcccacagtgagggggatgatgatgacgacatgggagaggatgaagatgaggacgatggtttctttgtgccccatgggtacctgtctgaggacgaaggtgtgacagaggagtgtgccgaccctgagaaccataaggtccgccagaaactgaaggccaaggagtgggacgagttcctggctaaggggaagcgctttcgcgtcctgcaacctgtgaagatcggctgcgtgtgggcggctgacagagactgcgcaggcgatgacctgaaggtactgcagcagttcgcagcctgcttcctggagaccctgccggcccaggaggagcagacgcccaaggcctccaagcgggagaggagagacgagcagatcctggcccagctgctgccgctcctgcacggcaatgtgaacgggagcaaggtcatcatccgggagttccaggagcactgccgccggggactgctcagcaaccacaccggcagcccgcggagcccctccaccacctacctgcacacccccacccccagcgaggatgccgccatcccctctaagtcccggctcaagcggctcatttccgagaactcagtgtatgagaagcggcctgacttcaggatgtgctggtacgtgcacccgcaggtgctacagagcttccagcaggagcacctgcccgtgccgtgccagtggagctatgtgacatcggtgccctcggcccccaaagaggacagtggcagcgtcccctccacggggcccagccagggcactcccatctcgctgaagaggaagtcagcgggcagcatgtgcatcacccaattcatgaagaagcgcaggcacgacggccagattggtgctgaagacatggacggcttccaggcagacacggaggaggaggaagaggaggagggcgactgtatgatcgtggatgtcccggatgctgcggaggtccaagccccgtgtggagccgcttccggagctgggggtggtgtgggggtggacaccggcaaggccaccctgacctcgagcccactgggtgcatcctgagagcaggggtgacgtatgtagaatgcttagggtgtcctccccacagagcagatacttgaaccgactcaattcctgtgtaaagagcactttgtcctgcttcacggacctccccaaagtgtgcagagttctatataggatgctggattagttcctttgatatttgtaaaaattcccccaagagccgcatatgaatctgccctttaataaagcattattgagattgctggcctattggggaagcctgcgggcacaggagcaggcgtggaatccaatacttgtaaatgaattgaagcgtcaggaccacccgcctggccacgtgcgcgggcccctggacctaacgaggcagtgtataaacttattctctagccctga

SEQ ID NO: 7 - DNA, 7078 bp, Homo sapiens
ataagaaaaaaaatattttaaaagggtaaccgttaaacagctaggacctgcaacttcagtgcttctgggataactggaacatcagaaggacagattttattacagcataatcacacctcatttctttcatcagcagttgtcaccagacgctgttacttcctaaaatggcggacaatcttcccacagagtttgatgtggttataatagggacaggtttgcccgaatccatccttgcagctgcatgttcaagaagtggtcagagggttctgcatattgattcaagaagctactatggaggaaactgggctagtttcagcttttcaggattgctatcctggttgaaggagtatcagcaaaacaatgacattggggaagaaagtactgttgtatggcaggacctgatccatgaaacagaagaagccatcactcttcgcaagaaggatgaaactattcaacacacagaagctttttgctacgccagtcaggatatggaggacaacgttgaagagattggtgctctgcagaaaaatccttctttgggggtgtctaataccttcactgaagttctggattctgcattacctgaagaaagccagttatcgtattttaatagcgacgaaatgcctgcaaaacacactcagaaaagtgatacagagatttcactagaagtaactgatgtagaggaatcagtggagaaggaaaagtattgtggagataaaacttgtatgcacacagtttcagataaagatggagataaagatgaaagcaaatctacagtagaagataaggccgatgaaccaattagaaataggattacttactctcaaatagttaaagaaggcaggaggtttaatattgatttggtgtcaaaactgctgtattctcaaggattgctaattgatcttttaatcaaatcagatgttagtcgttatgtagaatttaaaaatgtcactaggattcttgcatttcgggaaggaaaggtagaacaagttccttgttccagagcagatgtctttaatagcaaggaactcaccatggttgaaaagaggatgctaatgaaatttctcacattttgtttagagtatgaacaacatcctgatgaataccaagctttcaggcagtgttcattttcagaatacttaaaaactaaaaaactaactcccaaccttcaacattttgtactgcactcaattgcaatgacatcagaatcatcttgcactacaatagatggtcttaacgcaactaaaaacttccttcagtgtctcggacggtttggcaacaccccctttttatttcccttgtatggccaaggagaaattccccagggtttctgtaggatgtgtgcagtttttggtggaatctattgtcttcgtcataaagtacaatgctttgtagtcgacaaagaatctggacgatgtaaagcaattatagatcactttggtcaaagaataaatgctaaatattttattgtggaagacagttacctttctgaggaaacatgctcaaatgtgcagtataagcagatctctagggcagtactcattacagatcagtctatactaaagacagatttagatcagcagacttccattctgatagttcctccagcagagccaggagcttgtgctgtacgggtcacagaattatgttcttcaaccatgacatgcatgaaggacacctatctggtacatttgacatgttcatcttctaaaacagcaagagaagacttagaatcagtggtgaagaaattattcactccgtatactgaaacagaaataaacgaggaagaacttacaaagccaagactcttgtgggctctttattttaatatgagagattcctcgggaatcagcagaagctcgtataatggcttgccttccaatgtttatgtctgctctgggcctgactgtggcctgggaaatgagcatgctgtcaagcaagctgaaacacttttccaggagatctttccaactgaagaattctgccctccacctccaaatccagaagacattatctttgatggtgatgataagcagccagaggctcctggaaccaataatgtagtaatggccaaactagaatcctctgaggaaagcaaaaacctagaaagcccagagaagcaccttcaaaattagaaaagagcaatctcgaaatgctgttttggacctccttcatggcatcagaattttctcatttaaaggacagtttcccatatgagtaattagaagtggttatatatgatgaatgctatgcagatgttgtctttaactctcagacattcagcattgaatatctttgttaacctatcaatgagtgatttattgattattgaacattttgtttagaatgggctatatgacccagaatcttaaaacagagttagctttattttagtattgggtatatatgtaagggttccatattagcaactcagcttaaaggtaatgtatttgctaatgatcttcagattttatctttgtctacagaacaattagtaatacccaagtaatattttaattacttttgcagctgttacagttgctgcggcctgttcgaatagtgaaacatacacaaatggtaaattatgtggatcttttgcatataatataaatgtatagacatggtggtaggaatagcaactaatacaaatgccaatatgataataaaatacatttgtctataatcgtttaaagattagctttgcatgatcctttatgcactgtgaaggtctgaagtttataatactcacttgacccttgtaactgatgaggcaatgatgccaccacagtattctaatttacaaaaagaattggagttcaattagtggttgtaaagctcattttggggaggttgattgcaaaggaaatttgaaagataagatttattcttatttaatacttcagaaaatttctgcagagccctgccctggcacttaaaatagcttccaataagtaacttagaccaaaaggaaaaatgaagtgccccaggagaagatacttcagaagggctgttctgaaattcctaaggaggaattcttaggaattcctaaggagaaacagagtgaggcctttttaacctgagattacagatacttataaaaccctctataaatagattacccaaggtttttcagtgagaatgaaacataccaccttgttggctctaccactttaattaatatcactataacataactgataggaatgaatcaaaggaggatttaccatgccctttcggttgtgtcccacttaacaaattgtgaagtaacaattttctgtaatctctcttgcctcttagctgttatccagagtatagaaactttttttctcccagagccacccaacgtcataaaactggtagtactctaatggtgaaaacctgtggagctgtcagaagacatgaacttgcttttcctctagtccagtttccattcttcagtcagagtatgatgatccctgtgacagtttttgctctgaaatagtatttatcatgtgtttggtacctagtattatgctttctcatgacagtttctcaacaatcctgtgaggcaaattcgcatgtaccctctgtattagtgtgttctcatgctgttgataaagacacacctgagatggtaatttgtaaagaaaaaggtttaatggactcacagttccatgtggctggggaggcctcacaatcatggtggaaggtgaaaggcacgtcttacatggcggtggacaagagagaatgagaactaagtgaaaagggaaacccttttaaaaccatcagatatcgtgagacttatttactaccatgagaacagtatgggggaaacaactccatgattcagttatctcccaccaggttcctcccacaacacgtgggaattataggagctacaattcaagatgagatttgagtgggaacacagccaaaccatatcaccttcaaagaagaaataagagaattattagtaatttgctcagaatctggtatgtggaagagccaacatggggacccagccttttgtgattctaaaacctttgatctttctactaacattcactgttagagagtgtaggcgctgcaggagaaagagaaagtgcccacgaaaattagtctagcattgccgggggtaaaaagcacacactggtcctgcagcttattgaatcagagaaatgtgaagataagatgaactaaacaaacatattttagagcatggatctcgaagcagaatttggctaaattttaacaaaatgttcttcagtaacacatctcatgatctgaagattgtgttacaaaaaatattatcaggccaaaatttgttcggaatacactaatttttgctcctctatatgtgaggaaaatgagactagacagatttaagtaattgacaacttacttaaagtagcaaagtcatggattgtattgacttttaaaaatatagtaaaagtcatatttaaactttatcctaaagtttaaatctaacagaacaactgaaatacttgaaatagacctataaaatagtaattaaaatgagaaatacataagatgataaataaaatgaaggtgaaggtattccagatctaccgaaaagattttcagtatcacagattattcataagaaattgagaaaaggaacaatcagaagttgcaaaagatggtatagccgaatataatggaaataggaaaaattagtcgaaaataaaggttgatttagaaatgaagaaaatgaatatatttcttaatacaaaataagtgggaaatgagaagttataccaataaaaagcatttaaaaatttaggggatattgtaacccagtataattttctgacaggttggactttgaccctaatggacttactggtgaactttttcaaatgtttaaataatgtctatccatgtatcatgaaggacagtatgcttcaaattgtcttttgaggcagacatgttctcagtactaaaagacatttttagaaggattttattctcaacagatgcaaaatgcaaaataaaatattggcaaacaatacagcaacaaataatttactatcactcaggattataaggctggtgttaagcagaacagccattaaatcagcatcaaaagaacaaatagtaaaatccaaagtattaattacagataacttttcaaaaattcatcattcacccttgatttaattatttctctggcaatgatttaatagacttctcggagtctgttaagtacttaaaccaagaactaccattattcctactgggaaaacataaacatttctcaagtggaaagtaaacagtgttggcactatttttatatatggttaaagagacctgtcattgcaataaaagccagcattcacaaaatgaggaagataaggaaagtagcataaatattttctattaacatggctttacaactgctaaaacttatagtataaaaatgtactaacaaagactaattcaagaagttgcaggatacacaatttttaaaaatctcatttctacatcttagcagtgacaaactgcaatttaaaaagtgtgtttggttattaatatatatgagacttttaaagaaagttatataactacatagagataaattaagaaagatgcctaaatagaagcaagtttaaagagctatatttttaaacatgaacaaactcccatgggagccatgccagtgtagtggaaaagtagtacatggggagatggggagtttttttgaaaaccagaattacagttctcatttcactacttaccagttgtatactcttgggaaagtcactcctagtatctatttcaccatctacagaagagaaatacttcacagaattattgtggggattaagttagataatgtgttttaaaatataaagctacatccaaagaaatgccaatatgtgacattagtatgaaatttactacagttccatttaacattccaactggttgctgtgtggaatatggcataattgtaataaattatttaggaaagcaagcaaagatgtaagtttttttaatttagggggaaaaaatgggagccttgctctccaaatccttaaaacatgctattaagcaacctttctgaatattctgtggtgccaagtagaaagtttaactgaaattaataagccaatggaaagaaagaaatattaataactgctggtggaaagactagctagatgtcagtgtggaaagattagatccactttacatgtgatattccaaatgaattaaaatgttaagtataaaaagaaaaatactacaagtctcacaccaatagtggtataaaggaacttcatggcaattggcaaggtagatcaactaagagaaaaagttttaaatgtgtagtaaataggaaaaagacaaaacaagatggaatttaaaagaagctatttgcattacacatggatgcactcagtttttgtaaaactatatgcatatccataagggtttgtactcttaggcaaatttataaagcgatcgtgtataaatgatataaaaaatcaatttgaatggtattcaaatttcctaatattaaaaatgcaactttgacttagttcatgctattgtattagcaaaactgttttaattgcatgtgtccttatagcagcagcattgtgtattagtagccttttaagagaactgtgtagaagactataaaaagggctttataactgatcttttgacatactcactttgagtggcatatgcccaggaaaatatttaaaagaaagaaaagctatttgtacaaagttttctagcagttccactcagataactttaagggggaaaaaagcccaacgattggaaatggttaagtaaattttggtgtattgctagtgctatcacagaatgttatatagccattcaataatattgatatatgtcaaattgtatgcaaaaaagtgagattcaaaaatgttaataagaacataaattgtgtttactgatacatgtgaaaatttaggtctacattgaaaagaatcagaagataacatgtaattcagtttaacattaggggttctttatttttcttctgttaaatattgatgtatgcaataaaaaataaaagattaattggtaaagtggtttactg

SEQ ID NO: 8 - DNA, 1807 bp, Homo sapiens
gccggggccaggaggaggcgggcgcaggaggcgcgtgctcagtgtgctgggtaccaggcgactccgggacagggggtctcggccgtcggcgtcatggtttcgcgcgtgcagctcccgcctgagatccagctggctcagcgcctggcggggaatgagcaggtgacccgggaccgggcggtgaggaagctccggaaatacatcgtcgccaggactcagcgggccgcaggtggttttacgcacgacgagctgctgaaggtgtggaaaggactgttttattgcatgtggatgcaggacaagccactcctccaggaagaattaggaaggactatttcccagctcgttcatgcttttcagaccacggaggcgcagcacctgttccttcaggccttctggcagaccatgaatcgcgagtggacgggcattgacaggctgcgcctggataaattctacatgctcatgcggatggtcctgaacgagtccttgaaggttctgaagatgcaaggctgggaagaaagacagatcgaggagctgctagagctgctgatgactgagatcctgcaccccagcagccaggcccccaacggtgtgaagagccacttcatcgagatcttcctggaggagctgaccaaagtgggcgccgaggagcttacggcagaccagaacctgaagttcatcgaccccttctgcagaattgctgcccggaccaaggattccttggttttgaacaacatcactcgaggcatctttgagacgattgtggagcaggccccgcttgccattgaagacctcctgaatgaactggacacacaggatgaggaggtggcgtcggacagtgatgagtcctctgagggtggtgagcgtggagacgcgctgtcccagaagaggtctgagaagccgcccgcaggctccatctgcagggctgaacctgaggctggtgaggagcaggcaggtgacgacagggacagtggcggccccgttctccagtttgactacgaggcagttgctaacagactgtttgaaatggccagccgccagagcaccccttctcagaacagaaagcgtctctacaaagtgatccggaagctgcaggacctggcaggaggcattttccctgaagatgagatcccagagaaggcctgcaggcgcctgcttgaagggaggcggcagaagaagacgaagaagcagaagcgtctgctcaggttgcagcaggagagagggaaaggtgagaaggagcccccgagcccgggcatggagaggaagaggagcaggaggaggggtgtaggggccgaccccgaggcgcgggcagaggctggtgagcagccaggcacagctgagcgggccctgctccgagatcagcccaggggccgtggccagagaggggctcgccagagaaggaggacacctcggcccctgaccagtgcccgagcaaaggcggccaatgtccaggagccggagaagaagaagaaacgcagggagtgatgtggccgggccaaggacaggcagggagggaggccaggcctcgcttgcaccgcgggacgaggctgaccgggctgttctgtagactcaggaccgtggctccagaactcctgtgccaggcgggagggaagggcggcactggagagatgggcccatcattaggggccagcatcccaggaactggacctttccccagagcctccgcctgtggctgtgatgaccttgggccagaaggtcaaactccgaagactgaaactctgcctgcagcaggactggccgcccctgctgtggggggttcagaaaataaaatgccgcgcagcccttgccaggg

SEQ ID NO: 9 - DNA, 2699 bp, Homo sapiens
ttggcgcgtaaaagtggccgggactttgcaggcagcggcggccgggggcggagcgggatcgagccctcgccgaggcctgccgccatgggcccgcgccgccgccgccgcctgtcacccgggccgcgcgggccgtgagcgtcatggccttggccggggcccctgcgggcggcccatgcgcgccggcgctggaggccctgctcggggccggcgcgctgcggctgctcgactcctcgcagatcgtcatcatctccgccgcgcaggacgccagcgccccgccggctcccaccggccccgcggcgcccgccgccggcccctgcgaccctgacctgctgctcttcgccacaccgcaggcgccccggcccacacccagtgcgccgcggcccgcgctcggccgcccgccggtgaagcggaggctggacctggaaactgaccatcagtacctggccgagagcagtgggccagctcggggcagaggccgccatccaggaaaaggtgtgaaatccccgggggagaagtcacgctatgagacctcactgaatctgaccaccaagcgcttcctggagctgctgagccactcggctgacggtgtcgtcgacctgaactgggctgccgaggtgctgaaggtgcagaagcggcgcatctatgacatcaccaacgtccttgagggcatccagctcattgccaagaagtccaagaaccacatccagtggctgggcagccacaccacagtgggcgtcggcggacggcttgaggggttgacccaggacctccgacagctgcaggagagcgagcagcagctggaccacctgatgaatatctgtactacgcagctgcgcctgctctccgaggacactgacagccagcgcctggcctacgtgacgtgtcaggaccttcgtagcattgcagaccctgcagagcagatggttatggtgatcaaagcccctcctgagacccagctccaagccgtggactcttcggagaactttcagatctcccttaagagcaaacaaggcccgatcgatgttttcctgtgccctgaggagaccgtaggtgggatcagccctgggaagaccccatcccaggaggtcacttctgaggaggagaacagggccactgactctgccaccatagtgtcaccaccaccatcatctcccccctcatccctcaccacagatcccagccagtctctactcagcctggagcaagaaccgctgttgtcccggatgggcagcctgcgggctcccgtggacgaggaccgcctgtccccgctggtggcggccgactcgctcctggagcatgtgcgggaggacttctccggcctcctccctgaggagttcatcagcctttccccaccccacgaggccctcgactaccacttcggcctcgaggagggcgagggcatcagagacctcttcgactgtgactttggggacctcacccccctggatttctgacagggcttggagggaccagggtttccagagatgctcaccttgtctctgcagccctggagccccctgtccctggccgtcctcccagcctgtttggaaacatttaatttatacccctctcctctgtctccagaagcttctagctctggggtctggctaccgctaggaggctgagcaagccaggaagggaaggagtctgtgtggtgtgtatgtgcatgcagcctacacccacacgtgtgtaccgggggtgaatgtgtgtgagcatgtgtgtgtgcatgtaccggggaatgaaggtgaacatacacctctgtgtgtgcactgcagacacgccccagtgtgtccacatgtgtgtgcatgagtccatgtgtgcgcgtgggggggctctaactgcactttcggcccttttgctctgggggtcccacaaggcccagggcagtgcctgctcccagaatctggtgctctgaccaggccaggtggggaggctttggctggctgggcgtgtaggacggtgagagcacttctgtcttaaaggttttttctgattgaagctttaatggagcgttatttatttatcgaggcctctttggtgagcctggggaatcagcaaaggggaggaggggtgtggggttgataccccaactccctctacccttgagcaagggcaggggtccctgagctgttcttctgccccatactgaaggaactgaggcctgggtgatttatttattgggaaagtgagggagggagacagactgactgacagccatgggtggtcagatggtggggtgggccctctccagggggccagttcagggccccagctgccccccaggatggatatgagatgggagaggtgagtgggggaccttcactgatgtgggcaggaggggtggtgaaggcctcccccagcccagaccctgtggtccctcctgcagtgtctgaagcgcctgcctccccactgctctgccccaccctccaatctgcactttgatttgcttcctaacagctctgttccctcctgctttggttttaataaatattttgatgacgtttgggccgggttttgggactctgttgggaacatttcggggcgggagaggccaaggttgctggggaaatgcccattctccacttcccttctccctgtccgtgcccgatttgatttgagcctcataactcgaagaaaggtcagcttcctcgctgttttggtcctaactcaaaagcagatccagtaaaggtttttgttgt

SEQ ID NO: 10 - DNA, 2685 bp, Homo sapiens
caaataaaagcgatggcgattgggctgccgcgtttggcgctcggtccggtcgcgtccgacacccggtgggactcagaaggcagtggagccccggcggcggcggcggcggcgcgcgggggcgacgcgcgggaacaacgcgagtcggcgcgcgggacgaagaataatcatgggccagactgggaagaaatctgagaagggaccagtttgttggcggaagcgtgtaaaatcagagtacatgcgactgagacagctcaagaggttcagacgagctgatgaagtaaagagtatgtttagttccaatcgtcagaaaattttggaaagaacggaaatcttaaaccaagaatggaaacagcgaaggatacagcctgtgcacatcctgacttctgtgagctcattgcgcgggactagggagtgttcggtgaccagtgacttggattttccaacacaagtcatcccattaaagactctgaatgcagttgcttcagtacccataatgtattcttggtctcccctacagcagaattttatggtggaagatgaaactgttttacataacattccttatatgggagatgaagttttagatcaggatggtactttcattgaagaactaataaaaaattatgatgggaaagtacacggggatagagaatgtgggtttataaatgatgaaatttttgtggagttggtgaatgcccttggtcaatataatgatgatgacgatgatgatgatggagacgatcctgaagaaagagaagaaaagcagaaagatctggaggatcaccgagatgataaagaaagccgcccacctcggaaatttccttctgataaaatttttgaagccatttcctcaatgtttccagataagggcacagcagaagaactaaaggaaaaatataaagaactcaccgaacagcagctcccaggcgcacttcctcctgaatgtacccccaacatagatggaccaaatgctaaatctgttcagagagagcaaagcttacactcctttcatacgcttttctgtaggcgatgttttaaatatgactgcttcctacatcgtaagtgcaattattcttttcatgcaacacccaacacttataagcggaagaacacagaaacagctctagacaacaaaccttgtggaccacagtgttaccagcatttggagggagcaaaggagtttgctgctgctctcaccgctgagcggataaagaccccaccaaaacgtccaggaggccgcagaagaggacggcttcccaataacagtagcaggcccagcacccccaccattaatgtgctggaatcaaaggatacagacagtgatagggaagcagggactgaaacggggggagagaacaatgataaagaagaagaagagaagaaagatgaaacttcgagctcctctgaagcaaattctcggtgtcaaacaccaataaagatgaagccaaatattgaacctcctgagaatgtggagtggagtggtgctgaagcctcaatgtttagagtcctcattggcacttactatgacaatttctgtgccattgctaggttaattgggaccaaaacatgtagacaggtgtatgagtttagagtcaaagaatctagcatcatagctccagctcccgctgaggatgtggatactcctccaaggaaaaagaagaggaaacaccggttgtgggctgcacactgcagaaagatacagctgaaaaaggacggctcctctaaccatgtttacaactatcaaccctgtgatcatccacggcagccttgtgacagttcgtgcccttgtgtgatagcacaaaatttttgtgaaaagttttgtcaatgtagttcagagtgtcaaaaccgctttccgggatgccgctgcaaagcacagtgcaacaccaagcagtgcccgtgctacctggctgtccgagagtgtgaccctgacctctgtcttacttgtggagccgctgaccattgggacagtaaaaatgtgtcctgcaagaactgcagtattcagcggggctccaaaaagcatctattgctggcaccatctgacgtggcaggctgggggatttttatcaaagatcctgtgcagaaaaatgaattcatctcagaatactgtggagagattatttctcaagatgaagctgacagaagagggaaagtgtatgataaatacatgtgcagctttctgttcaacttgaacaatgattttgtggtggatgcaacccgcaagggtaacaaaattcgttttgcaaatcattcggtaaatccaaactgctatgcaaaagttatgatggttaacggtgatcacaggataggtatttttgccaagagagccatccagactggcgaagagctgttttttgattacagatacagccaggctgatgccctgaagtatgtcggcatcgaaagagaaatggaaatcccttgacatctgctacctcctcccccctcctctgaaacagctgccttagcttcaggaacctcgagtactgtgggcaatttagaaaaagaacatgcagtttgaaattctgaatttgcaaagtactgtaagaataatttatagtaatgagtttaaaaatcaactttttattgccttctcaccagctgcaaagtgttttgtaccagtgaatttttgcaataatgcagtatggtacatttttcaactttgaataaagaatacttgaacttgtc

SEQ ID NO: 11 - DNA, 2247 bp, Homo sapiens
agtcctgcgatttcgggtgtagagggagcaggggcctgcggggacctggtgtgggtggagtggggacaagcggtggagaagggtacgccagggtcgctgagagactctgttctccctggagggactggttgccatgagagcagccgtctgaggggacgcagcctgcactacgcgccccaagaggctgtgcgtggcgagcaggtcacgtgacgggagcgcgggctttggaaggcggctgaacgtcaggccacccgccgctaagctgagaagggagagcgagcttaggaccgcctgcccggggcaaccccgaaccaagctttagccgccgaggccgcgtgtcccaaaggccagtcatccctcctctgtgttgccatgggaattcaaggcctggccaaactaattgctgatgtggcccccagtgccatccgggagaatgacatcaagagctactttggccgtaaggtggccattgatgcctctatgagcatttatcagttcctgattgctgttcgccagggtggggatgtgctgcagaatgaggagggtgagaccaccagccacctgatgggcatgttctaccgcaccattcgcatgatggagaacggcatcaagcccgtgtatgtctttgatggcaagccgccacagctcaagtcaggcgagctggccaaacgcagtgagcggcgggctgaggcagagaagcagctgcagcaggctcaggctgctggggccgagcaggaggtggaaaaattcactaagcggctggtgaaggtcactaagcagcacaatgatgagtgcaaacatctgctgagcctcatgggcatcccttatcttgatgcacccagtgaggcagaggccagctgtgctgccctggtgaaggctggcaaagtctatgctgcggctaccgaggacatggactgcctcaccttcggcagccctgtgctaatgcgacacctgactgccagtgaagccaaaaagctgccaatccaggaattccacctgagccggattctgcaggagctgggcctgaaccaggaacagtttgtggatctgtgcatcctgctaggcagtgactactgtgagagtatccggggtattgggcccaagcgggctgtggacctcatccagaagcacaagagcatcgaggagatcgtgcggcgacttgaccccaacaagtaccctgtgccagaaaattggctccacaaggaggctcaccagctcttcttggaacctgaggtgctggacccagagtctgtggagctgaagtggagcgagccaaatgaagaagagctgatcaagttcatgtgtggtgaaaagcagttctctgaggagcgaatccgcagtggggtcaagaggctgagtaagagccgccaaggcagcacccagggccgcctggatgatttcttcaaggtgaccggctcactctcttcagctaagcgcaaggagccagaacccaagggatccactaagaagaaggcaaagactggggcagcagggaagtttaaaaggggaaaataaatgtgtttccccattatacctccttcaccccagaatatttgccgtcttgtacccttaagagctacagctagagaaaccttcacggggtggagagaggattctaaggcttttctagcgtgacccttttcagtagtgctagtcccttttttacttgatcttaatggcaagaaggccacagaggtacttttccttttttagctcaggaaaatatgtcaggctcaaaccacttctcaggcagtttaatggacactaagtccattgttacatgaaagtgatagatagcaacaagttttggagaagagagagggagataaaagggggagacaaaagatgtacagaaatgatttcctggctggccaactggtggccagtgggaggtgatggtggacctagactgtgcttttctgtcttgttcagccttgacccaccttgagagagagccaccaggaaggcgcatcttagcagatgggaggaactgctgagagaagatgggcagaaagctggagcccctggagttggctgtgtctgtgtttgtgactgattactggctgtgtcttgggtgggcagaaactcgaacttgctatgtaatttgtgtctagttattcagaggagtaagatggtgatgttcacctggcaatcagctgagttgagactttggaataagacactggttttcatgcgctgtttttgttttaaagttatgaagaaaaaagtcaataaaattctaaaagt

SEQ ID NO: 12 - DNA, 1668 bp, Homo sapiens
acgggccaaggcggcgcgtctcgggggtggagcctggaggtgaccgcgccgctgcaacgcccccaccccccgcggtcgcagtggttcagcccgagaacttttcattcataaaaagaaaagactccgcacggcgcgggtgagtcagaacccagcagccgtgtaccccgcagagccgccagccccgggcatgttccgagacttcggggaacccggcccgagctccgggaacggcggcgggtacggcggccccgcgcagcccccggccgcagcgcaggcagcccagcagaagttccacctggtgccaagcatcaacaccatgagtggcagtcaggagctgcagtggatggtacagcctcatttcctggggcccagcagttaccccaggcctctgacctaccctcagtacagccccccacaaccccggccaggagtcatccgggccctggggccgcctccaggggtacgtcgaaggccttgtgaacagatcagcccggaggaagaggagcgccgccgagtaaggcgcgagcggaacaagctggctgcggccaagtgcaggaaccggaggaaggaactgaccgacttcctgcaggcggagactgacaaactggaagatgagaaatctgggctgcagcgagagattgaggagctgcagaagcagaaggagcgcctagagctggtgctggaagcccaccgacccatctgcaaaatcccggaaggagccaaggagggggacacaggcagtaccagtggcaccagcagcccaccagccccctgccgccctgtaccttgtatctccctttccccagggcctgtgcttgaacctgaggcactgcacacccccacactcatgaccacaccctccctaactcctttcacccccagcctggtcttcacctaccccagcactcctgagccttgtgcctcagctcatcgcaagagtagcagcagcagcggagacccatcctctgacccccttggctctccaaccctcctcgctttgtgaggcgcctgagccctactccctgcagatgccaccctagccaatgtctcctccccttcccccaccggtccagctggcctggacagtatcccacatccaactccagcaacttcttctccatccctctaatgagactgaccatattgtgcttcacagtagagccagcttggggccaccaaagctgcccactgtttctcttgagctggcctctctagcacaatttgcactaaatcagagacaaaatatttcccatttgtgccagaggaatcctggcagcccagagactttgtagatccttagaggtcctctggagccctaaccccttccagatcactgccacactctccatcaccctcttcctgtgatccacccaaccctatctcctgacagaaggtgccactttacccacctagaacactaactcaccagccccactgccagcagcagcaggtgattggaccaggccattctgccgccccctcctgaaccgcacagctcaggaggcgcccttggcttctgtgatgagctgatctgcggatctcagctttgagaagccttcagctccagggaatccaagcctccacagcgagggcagctgctatttattttcctaaagagagtatttttatacaaacctaccaaaatggaataaaaggcttgaagctgtg

SEQ ID NO: 13 - DNA, 3623 bp, Homo sapiens
actgaaagctccggtgccagaccccacccccggccccggcccgggaccccctcccctcccgggatcccccggggttcccaccccgcccgcaccgccggggacccggccggtccggcgcgagcccccgtccggggccctggctcggcccccaggttggaggagcccggagcccgccttcggagctacggcctaacggcggcggcgactgcagtctggagggtccacacttgtgattctcaatggagagtgaaaacgcagattcataatgaaaactagcccccgtcggccactgattctcaaaagacggaggctgccccttcctgttcaaaatgccccaagtgaaacatcagaggaggaacctaagagatcccctgcccaacaggagtctaatcaagcagaggcctccaaggaagtggcagagtccaactcttgcaagtttccagctgggatcaagattattaaccaccccaccatgcccaacacgcaagtagtggccatccccaacaatgctaatattcacagcatcatcacagcactgactgccaagggaaaagagagtggcagtagtgggcccaacaaattcatcctcatcagctgtgggggagccccaactcagcctccaggactccggcctcaaacccaaaccagctatgatgccaaaaggacagaagtgaccctggagaccttgggaccaaaacctgcagctagggatgtgaatcttcctagaccacctggagccctttgcgagcagaaacgggagacctgtgcagatggtgaggcagcaggctgcactatcaacaatagcctatccaacatccagtggcttcgaaagatgagttctgatggactgggctcccgcagcatcaagcaagagatggaggaaaaggagaattgtcacctggagcagcgacaggttaaggttgaggagccttcgagaccatcagcgtcctggcagaactctgtgtctgagcggccaccctactcttacatggccatgatacaattcgccatcaacagcactgagaggaagcgcatgactttgaaagacatctatacgtggattgaggaccactttccctactttaagcacattgccaagccaggctggaagaactccatccgccacaacctttccctgcacgacatgtttgtccgggagacgtctgccaatggcaaggtctccttctggaccattcaccccagtgccaaccgctacttgacattggaccaggtgtttaagccactggacccagggtctccacaattgcccgagcacttggaatcacagcagaaacgaccgaatccagagctccgccggaacatgaccatcaaaaccgaactccccctgggcgcacggcggaagatgaagccactgctaccacgggtcagctcatacctggtacctatccagttcccggtgaaccagtcactggtgttgcagccctcggtgaaggtgccattgcccctggcggcttccctcatgagctcagagcttgcccgccatagcaagcgagtccgcattgcccccaaggtttttggggaacaggtggtgtttggttacatgagtaagttctttagtggcgatctgcgagattttggtacacccatcaccagcttgtttaattttatctttctttgtttatcagtgctgctagctgaggaggggatagctcctctttcttctgcaggaccagggaaagaggagaaactcctgtttggagaagggttttctcctttgcttccagttcagactatcaaggaggaagaaatccagcctggggaggaaatgccacacttagcgagacccatcaaagtggagagccctcccttggaagagtggccctccccggccccatctttcaaagaggaatcatctcactcctgggaggattcgtcccaatctcccaccccaagacccaagaagtcctacagtgggcttaggtccccaacccggtgtgtctcggaaatgcttgtgattcaacacagggagaggagggagaggagccggtctcggagaaaacagcatctactgcctccctgtgtggatgagccggagctgctcttctcagaggggcccagtacttcccgctgggccgcagagctcccgttcccagcagactcctctgaccctgcctcccagctcagctactcccaggaagtgggaggaccttttaagacacccattaaggaaacgctgcccatctcctccaccccgagcaaatctgtcctccccagaacccctgaatcctggaggctcacgcccccagccaaagtagggggactggatttcagcccagtacaaacctcccagggtgcctctgaccccttgcctgaccccctggggctgatggatctcagcaccactcccttgcaaagtgctcccccccttgaatcaccgcaaaggctcctcagttcagaacccttagacctcatctccgtcccctttggcaactcttctccctcagatatagacgtccccaagccaggctccccggagccacaggtttctggccttgcagccaatcgttctctgacagaaggcctggtcctggacacaatgaatgacagcctcagcaagatcctgctggacatcagctttcctggcctggacgaggacccactgggccctgacaacatcaactggtcccagtttattcctgagctacagtagagccctgcccttgcccctgtgctcaagctgtccaccatcccgggcactccaaggctcagtgcaccccaagcctctgagtgaggacagcaggcagggactgttctgctcctcatagctccctgctgcctgattatgcaaaagtagcagtcacaccctagccactgctgggaccttgtgttccccaagagtatctgattcctctgctgtccctgccaggagctgaagggtgggaacaacaaaggcaatggtgaaaagagattaggaaccccccagcctgtttccattctctgcccagcagtctcttaccttccctgatctttgcagggtggtccgtgtaaatagtataaattctccaaattatcctctaattataaatgtaagcttatttccttagatcattatccagagactgccagaaggtgggtaggatgacctggggtttcaattgacttctgttccttgcttttagttttgatagaagggaagacctgcagtgcacggtttcttccaggctgaggtacctggatcttgggttcttcactgcagggacccagacaagtggatctgcttgccagagtcctttttgcccctccctgccacctccccgtgtttccaagtcagctttcctgcaagaagaaatcctggttaaaaaagtcttttgtattgggtcaggagttgaatttggggtgggaggatggatgcaactgaagcagagtgtgggtgcccagatgtgcgctattagatgtttctctgataatgtccccaatcataccagggagactggcattgacgagaactcaggtggaggcttgagaaggccgaaagggcccctgacctgcctggcttccttagcttgcccctcagctttgcaaagagccaccctaggccccagctgaccgcatgggtgtgagccagcttgagaacactaactactcaataaaagcgaaggtgg

SEQ ID NO: 14 - DNA, 949 bp, Homo sapiens
attggtgggatgagcaatccgagttcccggatgagggaacattctgcagtataaagggagcagggaaggcgggagacagcgcagtttgaatcgcggtgcgacgaaggagtaggtggtgggatctcaccgtgggtccgattagccttttctctgccttgcttgcttgagcttcagcggaattcgaaatggctggcggtaaggctggaaaggactccggaaaggccaagacaaaggcggtttcccgctcgcagagagccggcttgcagttcccagtgggccgtattcatcgacacctaaaatctaggacgaccagtcatggacgtgtgggcgcgactgccgctgtgtacagcgcagccatcctggagtacctcaccgcagaggtacttgaactggcaggaaatgcatcaaaagacttaaaggtaaagcgtattacccctcgtcacttgcaacttgctattcgtggagatgaagaattggattctctcatcaaggctacaattgctggtggtggtgtcattccacacatccacaaatctctgattgggaagaaaggacaacagaagactgtctaaaggatgcctggattccttgttatctcaggactctaaatactctaacagctgtccagtgttggtgattccagtggactgtatctctgtgaaaaacacaattttgcctttttgtaattctatttgagcaagttggaagtttaattagctttccaaccaaccaaatttctgcattcgagtcttaaccatatttaagtgttactgtggcttcaaagaagctattgattctgaagtagtgggttttgattgagttgactgtttttaaaaaactgtttggattttaattgtgatgcagaagttatagtaacaaacatttggttttgtacagacattatttccactctggtggataagttcaataaaggtcatatcccaaacta

SEQ ID NO: 15 - DNA, 2625 bp, Homo sapiens
agatgcgagcactgcggctgggcgctgaggatcagccgcttcctgcctggattccacagcttcgcgccgtgtactgtcgccccatccctgcgcgcccagcctgccaagcagcgtgccccggttgcaggcgtcatgcagcgggcgcgacccacgctctgggccgctgcgctgactctgctggtgctgctccgcgggccgccggtggcgcgggctggcgcgagctcggcgggcttgggtcccgtggtgcgctgcgagccgtgcgacgcgcgtgcactggcccagtgcgcgcctccgcccgccgtgtgcgcggagctggtgcgcgagccgggctgcggctgctgcctgacgtgcgcactgagcgagggccagccgtgcggcatctacaccgagcgctgtggctccggccttcgctgccagccgtcgcccgacgaggcgcgaccgctgcaggcgctgctggacggccgcgggctctgcgtcaacgctagtgccgtcagccgcctgcgcgcctacctgctgccagcgccgccagctccaggtgagccgcccgcgccaggaaatgctagtgagtcggaggaagaccgcagcgccggcagtgtggagagcccgtccgtctccagcacgcaccgggtgtctgatcccaagttccaccccctccattcaaagataatcatcatcaagaaagggcatgctaaagacagccagcgctacaaagttgactacgagtctcagagcacagatacccagaacttctcctccgagtccaagcgggagacagaatatggtccctgccgtagagaaatggaagacacactgaatcacctgaagttcctcaatgtgctgagtcccaggggtgtacacattcccaactgtgacaagaagggattttataagaaaaagcagtgtcgcccttccaaaggcaggaagcggggcttctgctggtgtgtggataagtatgggcagcctctcccaggctacaccaccaaggggaaggaggacgtgcactgctacagcatgcagagcaagtagacgcctgccgcaaggttaatgtggagctcaaatatgccttattttgcacaaaagactgccaaggacatgaccagcagctggctacagcctcgatttatatttctgtttgtggtgaactgattttttttaaaccaaagtttagaaagaggtttttgaaatgcctatggtttctttgaatggtaaacttgagcatcttttcactttccagtagtcagcaaagagcagtttgaattttcttgtcgcttcctatcaaaatattcagagactcgagcacagcacccagacttcatgcgcccgtggaatgctcaccacatgttggtcgaagcggccgaccactgactttgtgacttaggcggctgtgttgcctatgtagagaacacgcttcacccccactccccgtacagtgcgcacaggctttatcgagaataggaaaacctttaaaccccggtcatccggacatcccaacgcatgctcctggagctcacagccttctgtggtgtcatttctgaaacaagggcgtggatccctcaaccaagaagaatgtttatgtcttcaagtgacctgtactgcttggggactattggagaaaataaggtggagtcctacttgtttaaaaaatatgtatctaagaatgttctagggcactctgggaacctataaaggcaggtatttcgggccctcctcttcaggaatcttcctgaagacatggcccagtcgaaggcccaggatggcttttgctgcggccccgtggggtaggagggacagagagacagggagagtcagcctccacattcagaggcatcacaagtaatggcacaattcttcggatgactgcagaaaatagtgttttgtagttcaacaactcaagacgaagcttatttctgaggataagctctttaaaggcaaagctttattttcatctctcatcttttgtcctccttagcacaatgtaaaaaagaatagtaatatcagaacaggaaggaggaatggcttgctggggagcccatccaggacactgggagcacatagagattcacccatgtttgttgaacttagagtcattctcatgcttttctttataattcacacatatatgcagagaagatatgttcttgttaacattgtatacaacatagccccaaatatagtaagatctatactagataatcctagatgaaatgttagagatgctatatgatacaactgtggccatgactgaggaaaggagctcacgcccagagactgggctgctctcccggaggccaaacccaagaaggtctggcaaagtcaggctcagggagactctgccctgctgcagacctcggtgtggacacacgctgcatagagctctccttgaaaacagaggggtctcaagacattctgcctacctattagcttttctttatttttttaactttttggggggaaaagtatttttgagaagtttgtcttgcaatgtatttataaatagtaaataaagtttttaccattaaaaaaatatctttccctttgttattgaccatctctgggctttgtatcactaattattttattttattatataataattattttattataataaaatcctgaaagggg

SEQ ID NO: 16 - DNA, 4587 bp, Homo sapiens
ccaagattctacattgctcatctgggcatctgagcctccttcgaagtttcctgtcacaactgtcctcttgacagcatggatgaggaggaagacaatctgtctctgctgaccgcactgctggaagaaaatgagtcagccttggattgtaattcagaagaaaataacttcttgacgcgggaaaatggcgagcccgacgcatttgatgagctctttgatgccgacggcgacggtgaatcttatacagaagaggctgatgatggagaaacaggagagacaagagacgaaaaggaaaatctggccactctctttggagatatggaggacttaacagatgaagaagaagttcccgcatcacagtcaactgaaaatagggtcctccctgctcctgcccccaggcgagagaaaacgaatgaagagttgcaagaggaattaaggaatttgcaagagcaaatgaaggccttacaagagcagctaaaagtaacaacaattaaacagacagcaagcccagcccgtctgcaaaaatcccctgagaagtctccccggccacctcttaaggagaggagagttcagagaattcaggagtcaacatgcttttctgcggagcttgatgtccctgcgctaccaagaaccaagagggtggctcgaacaccaaaggcttcacctccagatcccaaaagctcatcttcaaggatgacaagtgcaccctcccaacccctacagacgatttctcggaacaaacctagtgggataactagaggtcaaattgtggggaccccaggaagttctggggaaacgactcaacccatctgtgtggaagccttctctggtctgcggctcaggcggcctcgagtatcctccacagaaatgaacaagaaaatgaccggccgaaaactgatcagactgtctcagatcaaggaaaagatggccagagagaagctggaagaaatagattgggtgacatttggggttatattgaagaaggttacgccacagagtgtgaatagtggaaaaaccttcagcatatggaaactgaatgatcttcgtgacctgacacaatgtgtgtccttgttcttatttggagaagttcacaaagcgctctggaagacggagcaggggactgtcgtagggatcctcaatgccaaccccatgaagcccaaggatggttcagaggaggtgtgtttatctatcgatcatcctcagaaggtcttaattatgggtgaagctcttgacctgggaacctgtaaagccaagaagaagaatggagagccgtgcacgcagactgtgaatttgcgtgactgtgagtactgtcagtaccatgtccaggctcagtacaagaagctcagcgcaaagcgtgcggatctgcagtccaccttctctggaggacgaattccaaagaagtttgcccgcagaggcaccagcctcaaagaacggctgtgccaagatggcttttactacggaggggtttcttctgcctcgtatgcagcttcaattgcagcagctgtggctcctaagaagaagattcaaaccactctgagtaatctggttgttaagggcacaaacttgatcatccaggaaacacggcaaaaactcggaataccccagaagagcctgtcttgctctgaggagttcaaggaactgatggacctgccgacgtgtggagccaggaacttaaaacaacatttagccaaagccacagcttcagggattatggggagcccaaaaccagccatcaagtccatctcggcctcagcactcttgaagcaacagaagcagcggatgttggagatgaggagaaggaaatcagaagaaatacagaagcgatttctgcagagctcaagtgaagttgagagcccagctgtgccatcttcatcaagacagccccctgctcagcctccacggacaggatccgagttccccaggctggagggagccccggccacaatgacgcccaagctggggcgaggtgtcttggaaggagatgatgttctcttttatgatgagtcaccaccaccaagaccaaaactgagtgctttagcagaagccaaaaagttagctgctatcaccaaattaagggcaaaaggccaggttcttacaaaaacaaacccaaacagcattaagaagaaacaaaaggaccctcaggacatcctggaggtgaaggaacgtgtagaaaaaaacaccatgttttcttctcaagctgaggatgaattggagcctgccaggaaaaaaaggagagaacaacttgcctatctggaatctgaggaatttcagaaaatcctaaaagcaaaatcaaaacacacaggcatcctgaaagaggccgaggctgagatgcaggagcgctactttgagccactggtgaaaaaagaacaaatggaagaaaagatgagaaacatcagagaagtgaagtgccgtgtcgtgacatgcaagacgtgcgcctatacccacttcaagctgctggagacctgcgtcagtgagcagcatgaataccactggcatgatggtgtgaagaggtttttcaaatgtccctgtggaaacagaagcatctccttggacagactcccgaacaagcactgcagtaactgtggcctctacaaatgggaacgggacggaatgctaaaggtatgccatttgcgtactaatttttgactccttttagtgacccatgctaataatgtggaaccatctcctattaaaatattttcatttttctaggaaaagactggtccaaagataggaggagaaactctgttaccaagaggagaagaacatgctaaatttctgaacagccttaaataacccgaacttcagacattttcccacagacttcctggcctcctgtgactctggaaagcaaaggattggctgtgtattgtccattgattcctgattgacgccgtcaaaaacaaatgcttgttaagcccataagctttgcctgcttactttctgccattgggttggtttgataccacatttaacattgacatttaagtggaaaaccaagttatcattgtcttttctaagctcagtgtggatgattgcattacttcattcactgaagtttttgcccaaaaattggaaggtaaacagagagctatgtttctgtatcttttggttatagagtgttcacttctttatcataacaaaattctagtgtttatacgaacacccagaggcaaaagaatttggcttaattctcactccaggtaagtagcttaacttctgggcttcagttttctcatctgtaaaatcaggaagattggactaagtgatcctgaaatgtattttttagcactggatttctacaaataataaaactttcccatctagataatgatgatcacatagtcttgatgtacggacattaaaagccagatttcttcattcaattctgttatctctgttttactctttgaaattgatcaagccactgaatcactttgcatttcagtttatatatatagagagaaagaaggtgtctgctcttacattattgtggagccctgtgatagaaatatgtaaaatctcatattattttttttttaatttttttattttttatgacagggtctcactatgtcaccctggctggagtgcagtagtgcgatcgcggcacactgcagccttggcttccctgggctcaagcagtcctcccacctcagtctcccaaatagctaggactacaggcgtgcgtgaccaagcccagctaatttttgcattttttgtagagatggggttttgccatgttgctcaggctggtctcaaactcctgagcactagcaatccacccacctctgtttccaaaaaaaaaaaaaaaatgaaaggtcaacccctatgcaaattaccacagcaaaggtttcattcaggagattcttccatctgggcaacctggttttccaaatatcatttgacctaagtgaatgttgatactagctaaagattgggtaaattggttgaattattgtattgaagcttgagctgtagctaaaagtaatttaggtttcccctaagatgttattatgttagggacataacacttttgggaggttgttgtgggagatggttgatttaggttttcaaaagctagaaataaaatttacatgccttagatttcataaaattctgctctaattgggtggaaggtgctgtatctaacttgtgttcctcctaaggttatgtcctaataactattcttttaggagtatacttctactttatagaaggttgcttttctttttaattttttctaacaaagaaaagaataaagtatttattaataagaaccagaaagcacttgaaactgatgtttttaatggctcatttagggtagatttatttatctcattaacttaaaacagctatgtgtatgaaataggtcacaacagaacttgaacaccaggttggtgtctgagcaatccctttcttatgggaaaaacaatgttcttgtttgaacagagggtatcattgcagtcagtattcacgtgtatattgttatataagttgtataatatgcttgtaaaggctgagggtgagctgtatctggatgcctttttacaatttgattttaacttttaaaataaatttaaaacataa

SEQ ID NO: 17 - DNA, 3432 bp, Homo sapiens
acttttcgcgcgaaacctggttgttgctgtagtggcggagaggatcgtggtactgctatggcggaatcatcggaatccttcaccatggcatccagcccggcccagcgtcggcgaggcaatgatcctctcacctccagccctggccgaagctcccggcgtactgatgccctcacctccagccctggccgtgaccttccaccatttgaggatgagtccgaggggctcctaggcacagaggggcccctggaggaagaagaggatggagaggagctcattggagatggcatggaaagggactaccgcgccatcccagagctggacgcctatgaggccgagggactggctctggatgatgaggacgtagaggagctgacggccagtcagagggaggcagcagagcgggccatgcggcagcgtgaccgggaggctggccggggcctgggccgcatgcgccgtgggctcctgtatgacagcgatgaggaggacgaggagcgccctgcccgcaagcgccgccaggtggagcgggccacggaggacggcgaggaggacgaggagatgatcgagagcatcgagaacctggaggatctcaaaggccactctgtgcgcgagtgggtgagcatggcgggcccccggctggagatccaccaccgcttcaagaacttcctgcgcactcacgtcgacagccacggccacaacgtcttcaaggagcgcatcagcgacatgtgcaaagagaaccgtgagagcctggtggtgaactatgaggacttggcagccagggagcacgtgctggcctacttcctgcctgaggcaccggcggagctgctgcagatctttgatgaggctgccctggaggtggtactggccatgtaccccaagtacgaccgcatcaccaaccacatccatgtccgcatctcccacctgcctctggtggaggagctgcgctcgctgaggcagctgcatctgaaccagctgatccgcaccagtggggtggtgaccagctgcactggcgtcctgccccagctcagcatggtcaagtacaactgcaacaagtgcaatttcgtcctgggtcctttctgccagtcccagaaccaggaggtgaaaccaggctcctgtcctgagtgccagtcggccggcccctttgaggtcaacatggaggagaccatctatcagaactaccagcgtatccgaatccaggagagtccaggcaaagtggcggctggccggctgccccgctccaaggacgccattctcctcgcagatctggtggacagctgcaagccaggagacgagatagagctgactggcatctatcacaacaactatgatggctccctcaacactgccaatggcttccctgtctttgccactgtcatcctagccaaccacgtggccaagaaggacaacaaggttgctgtaggggaactgaccgatgaagatgtgaagatgatcactagcctctccaaggatcagcagatcggagagaagatctttgccagcattgctccttccatctatggtcatgaagacatcaagagaggcctggctctggccctgttcggaggggagcccaaaaacccaggtggcaagcacaaggtacgtggtgatatcaacgtgctcttgtgcggagaccctggcacagcgaagtcgcagtttctcaagtatattgagaaagtgtccagccgagccatcttcaccactggccagggggcgtcggctgtgggcctcacggcgtatgtccagcggcaccctgtcagcagggagtggaccttggaggctggggccctggttctggctgaccgaggagtgtgtctcattgatgaatttgacaagatgaatgaccaggacagaaccagcatccatgaggccatggagcaacagagcatctccatctcgaaggctggcatcgtcacctccctgcaggctcgctgcacggtcattgctgccgccaaccccataggagggcgctacgacccctcgctgactttctctgagaacgtggacctcacagagcccatcatctcacgctttgacatcctgtgtgtggtgagggacaccgtggacccagtccaggacgagatgctggcccgcttcgtggtgggcagccacgtcagacaccaccccagcaacaaggaggaggaggggctggccaatggcagcgctgctgagcccgccatgcccaacacgtatggcgtggagcccctgccccaggaggtcctgaagaagtacatcatctacgccaaggagagggtccacccgaagctcaaccagatggaccaggacaaggtggccaagatgtacagtgacctgaggaaagaatctatggcgacaggcagcatccccattacggtgcggcacatcgagtccatgatccgcatggcggaggcccacgcgcgcatccatctgcgggactatgtgatcgaagacgacgtcaacatggccatccgcgtgatgctggagagcttcatagacacacagaagttcagcgtcatgcgcagcatgcgcaagacttttgcccgctacctttcattccggcgtgacaacaatgagctgttgctcttcatactgaagcagttagtggcagagcaggtgacatatcagcgcaaccgctttggggcccagcaggacactattgaggtccctgagaaggacttggtggataaggctcgtcagatcaacatccacaacctctctgcattttatgacagtgagctcttcaggatgaacaagttcagccacgacctgaaaaggaaaatgatcctgcagcagttctgaggccctatgccatccataaggattccttgggattctggtttggggtggtcagtgccctctgtgctttatggacacaaaaccagagcacttgatgaactcggggtactagggtcagggcttatagcaggatgtctggctgcacctggcatgactgtttgtttctccaagcctgctttgtgcttctcacctttgggtgggatgccttgccagtgtgtcttacttggttgctgaacatcttgccacctccgagtgctttgtctccactcagtaccttggatcagagctgctgagttcaggatgcctgcgtgtggtttaggtgttagccttcttacatggatgtcaggagagctgctgccctcttggcgtgagttgcgtattcaggctgcttttgctgcctttggccagagagctggttgaagatgtttgtaatcgttttcagtctcctgcaggtttctgtgcccctgtggtggaagagggcacgacagtgccagcgcagcgttctgggctcctcagtcgcaggggtgggatgtgagtcatgcggattatccactcgccacagttatcagctgccattgctccctgtctgtttccccactctcttatttgtgcattcggtttggtttctgtagttttaatttttaataaagttgaataaaatat

SEQ ID NO: 18 - DNA, 7667 bp, Homo sapiens
ggcccaagccgccattgttccgccgagggaggacagcggggcctggcgctggcgccgagacgccgcttagcggccgccactggagacactccctcccgcctcccgggtctcctggcggcggcggagtgaggctgacagcggggaacctgggagacccctccgccctccccgcggtggcagcggccgatccccggctccggcgcgagggacggccgcgatgcgctcggcctgaggttacccggcccggcccttcctcgcttccctcgactattccactgcgtctccgcgccccggcgtcatcctgcgagtccctctgacgggagggaagatggctgcacggagctggcaggacgagctggcccagcaggccgaggagggctcggcccggctgcgggaaatgctctcggtcggcctaggctttctgcgcaccgagctgggcctcgacctggggctggagccgaaacggtaccccggctgggtgatcctggtgggcactggcgcgctcgggctgctgctgctgtttctgctgggctacggctgggccgcggcttgcgccggcgcccgcaaaaagcggaggagcccgccccgcaagcgggaggaggcggcggccgtgccggccgcggcccccgacgacctggccttgctgaagaatctccggagcgaggaacagaagaagaagaaccggaagaaactgtccgagaagcccaaaccaaatgggcggactgttgaagtggctgagggtgaagctgttcgaacacctcaaagtgtaacagcaaagcagccaccagagattgacaagaaaaatgaaaagtcaaagaaaaataagaagaaatcaaagtcagatgctaaagcagtgcaaaacagttcacgccatgatggaaaggaagttgatgaaggagcctgggaaactaaaattagtcacagagagaaacgacagcagcgtaaacgtgataaggtgctgactgattctggttcattggattcaactatccctgggatagaaaataccatcacagttaccaccgagcaacttacaaccgcatcatttcctgttggttccaagaagaataaaggtgattctcatctaaatgttcaagttagcaactttaaatctggaaaaggagattctacacttcaggtttcttcaggattgaatgaaaacctcactgtcaatggaggaggctggaatgaaaagtctgtaaaactctcctcacagatcagtgcaggtgaggagaagtggaactccgtttcacctgcttctgcaggaaagaggaaaactgagccatctgcctggagtcaagacactggagatgctaatacaaatggaaaagactggggaaggagttggagtgaccgttcaatattttctggcattgggtctactgctgagccagtttctcagtctaccacttctgattatcagtgggatgttagccgtaatcaaccctatatcgatgatgaatggtctgggttaaatggtctgtcttctgctgatcccaactctgattggaatgcaccagcagaagagtggggcaattgggtagacgaagaaagagcttcacttctaaagtcccaggaaccaattcctgatgatcaaaaggtctcagatgatgataaagaaaagggagagggagctcttccaactgggaaatccaaaaagaaaaaaaagaaaaagaagaagcaaggtgaagataactctactgcacaggacacagaagaattagaaaaagagattagagaagaccttccagtgaatacctctaaaacccgtccaaaacaggaaaaagctttttccttgaagaccataagcactagtgatccagccgaagtactcgtcaaaaatagccagcctatcaagactcttccacctgctacttctaccgagccatctgtaatcttatcaaaaagtgattctgacaagagctcttcccaagtgccgccaatactacaagagacagataaatccaagtcaaataccaagcaaaatagtgtgcctccttcacagaccaagtctgaaactagctgggaatctcccaaacaaataaaaaagaagaaaaaagccagacgagaaacgtgaaattttttttcctgaattggacatgtgtttgcaaacacttgtcttgaagattatgctgtttatgcaataatttgtgaacatgtacagagttttatataaatttaaaccaatttttaaaacaaaactgcggacaccaccataaaaatggaatcaaaagaaagttaatttatgaaattaagaggtcagcagaatatactcagtgatggaagacacttgggaaagtctttttaatagaacaagaacgatcttaatttaagaatattatcctggtttaacaacagtgccctgtttacaacagattgtgccctatctcatctgcagccgaggaataaaggattctgattagaaagagggttgcctacagattagtaagcaattccttggatcttatgcacagaacttgtaccatttgaatctgttttatgcttaaatcaaagtgctttgatcaaatgcataacctgccatatctttacatatttgttggtagcaatttgtattaaagaaatcacaagtgcaaataaaaagtcatttatcatttgtttaactaaactgtcatggtttagtttacaatttttaaaaagttcttaaaatactgaaaatgcagttgacacttgtgtatggcttatgaagttatttttgatagtcttacattacttgaattgttcaaagtacagtatattttaaattaagaaaagtgaactatatgtatttgttttatacatttaaggcttagactcataaataatgctattgtttatgatttgaaaactttcaggcaaaatccaatttacatttttcccttccctagcaattacttttttccagcttcaactcttcttagttactaatactttgttgactttaaaaatgaaatcattcacaaacttttggtatatgatggagaatgaaaaactagagtcagacagctttaattgacattgtcaacacctccagttatcaggaatacatttttttactgccttaacctgtagtgcgtagaatatgcatcaatttcttgaaggagattcatgtttttataagaattttcatgtaattattgcaattgtggtcaaataaggaacgtttcctgcttgaaattatattgatttaaatgatgtgtgagatgtttcaccattttcaggcactgtgtaattctattgtaataaactggcaggtatctttgtaactataaatagtgcatgctcagccatgtacactgtaaatagcctttaccaaacgtgtttgacaaggaccataattaacatcacttagtgaattgtgataaagaaaaaaaagccatgatttattcgatgtgattggcttgtttttatgtggcgccaagaacgaacctgtttaacagctgtaaccaatggtactgatctatccatccaatgttgtcattatatttgactgtggttcaacagtattgcgttgtcagactaggaaagctaaacgaacaaaatggttttagttttgctgaagactggccttattaatggacagctttcctaacaagagattattaacttttatcaggtgttaacatctgtttcaggaacatggcagtatgtttacatgtcagaagttttgtttaattctatggtatttctaaattgacttgtttaaataaattcagcaaatggatagcattgttttttatttgcttcaatatgggggtagataatagctaaagagccaaggatgaatttcttcaaatgactttattctgttagctttacataggtgttggaggattcctaaggtgtcagcattttgtaaaggtaccacaaaggagaagttgatagggaatctaattttagaatgtgccaaatggtctgtgctcaacaatataattgaactctctcaactctacctcaccatttctttatctcaaaattctgttggctttgtcaaacgttggattttatttctgcagcctagtatctccccattctaccacctatgccagatgttaaagacagcagatgttttgaggagaatggcattgtggagatgcagagatgcgttgctaagttgaggtggatccagtatagagatacctctatttcttctttatggctcaagagctaggacttggattttgttttaagagatggcagctggccgggtgcagtggctcacgtctgtaatcccagcactttgggaggccgaggcaggtggatcacgaggtcaggagttcaagaccagcctggccaagagggtgaaaccccatctttactaaaaatacaaaaaaaaaaattagctgggtgtggtggtgggctcctgtaatcccagctactcaggaggctaaggcagagaatcatttgaacccaggagacggagtttgcaaagccaagatcgtgccactgcactccagcctgggcaacagaaggagactccgtctcaaaaaaaaaaaaaagatggcagctatataaatgataaaattaattacattctctttcacatgcatgaggtgcaaactctgtcacaaagtattttaattaccttttaccttgtttcatagatctttatgtgacataaaaacagtttctggcacggtggctcacgcctgtaatcctagcactttgggaggctgaggcaggtggatcacctgaggtcaggagtttgagaccagcctggccaatatggtgaaaccccatctctacaaaatttgcaaaaagtagatgggtgtggtagtgggcgcctgtaatcccagctactcaggaggttgaggcagagaatcgcttgaacccggggggtggaggttgcagtgagctgagatcgcaccactgcactccagcatgaaagagcgagactcaatctcaaaaaaaaaaaagtttctggcacctgaacaggaactggtttccatcatcaactcagaaagcactaaaatctaggtggtgattcagggaggagcaggggaagacagcctcctatggtggcatgaataagatgcttccagaactagtagggaaataactaacctcttcaggctttatcaggcctggaggggaaccttgctcatgttagcaagaaaggtatcctagagaagccactcaaaaggctccctaatccagcctgtctccacatacatactgaaaattcttccctactctgaggcagggtgtagtggtttaggggtttctccagactggaatcctacctatctgtaccgacaattgagcaaacaacagttgagagagtccaaaaaaaaaagtattaaaatgtgattgatgtaatttaccatgtttactttatgcatgcattttattggggaggggaggtcagaataattcacccaaatctagtggtcttatttcataggctaatctggtttatatttgcattaaagatactggagggcaatatttacagagtttagtttttcttaattaaaaacagtcctctattaatatagtgtgaaatatctttcaaaatttagagtttaggtttaagatgtctactagatatctttaagattttcctgtaaactcactgcacaaactggaattactttccaaaagacttagggaatgcaaatatgttactcataagatgcattgagtattgtaaataaaacaaaccatttttgatttgtttaaattgctcgttacagttctcttgtggggagggactttgtcagtcattttgcatcttaagctagactaaactttttgttgttgttttcctaaaaccataggtgcaagctttgccgctgggaagtcatattgaattaagcacttttgaaaatgtcactgtttgtgacacacaatgttctctacagaaaacttcttctatcttatgtcattttagcagtagatgtagctgcctgccaccaggtgcaatatgtcatttgcatcagccttttcagttaaggaaattaaaacttggcatgcattagttcatatgtatgaggttggctgtgtccccaaacagcaattgcttgtacaagatagaagtttgcttctcagctgggcatggtggctcatgcctgtaatccaagctctttgggaggccaacgcgggaggattgtttgagcccaggagtttgaaaccatcctgagcaatagagagacccccatctcgacaaaaaaaaaaaaaaaaaattagaaacaaaaaaaagattgtttctctttcatattaaagtttgggaaggcaatccagagcccatatgacattatgcagggtcagggatccgggttctttctatattgttcctccccattctcaacctgtagctttttttttttttcttttaatgagatagggtctcactctgttgcccaggctggagtgcagtggcacacttctggctcacttcagcctggaactcccgggctcgagctatattctcccactttagcctcagcctccagagtacctgggactacaggtacacaccaccatgcctggctaaattttttttttttttttttggtagagatgaggtcattgctatgttgcccaggctggccttgaagtccagggcttaagtgatcctcctgccttggcctcccaaagtgctggtgttacaggtgtgagccaccacacctggccaacatgtggctttcagttcttacttgaagacagctgctctagctagaaacttcctatcggcatctgagccagctggtagagggcattacctcccccacccccaagaacacttcttggaagttacacacaatacataaacttcaatttcaaacagttgcttggtcccactagccatgaagctggatgggacgtaatattctatctgggttgtcatgggccaaattaacattttgagattctgttaggaagatgagaattggataatgggcacctctaacagtgtctgtcagagttgacatacattgtgtatctcctgcaccaaagcatttttgagatcaagtgttcttccagctgagcagaaatttggaaggctattcagtgctgcttagtgtagcagctaataatgttccaacttctatatgatagtttgctttttgttttttgtttttttctagagacagagtctcgttgcccaggctggtctccaattcctgggttcaagcaatcctcctgactcagcctcctaaatgctgggattacaggcatgaaccactgtgcccagtctatatataatagattttagaagaaatttctgccactcagtgactgctttaaattctagagacagaggctgagagaaacttagtagcctgcctgcgcatactgcaagtacagactatataacaagttgaaagagaatcaccctggtatataatattttaaaacatgaaaaaggcattactattgttctggtctaagtactctaacaggacgatgatttctaaccctagcatcatgacatgtatatagtgtgttgtaagacatttgccagctaatagttacagtactgaagcttgtgaatacgttaattgagaaaactttaagcaggttcaaagttatcccatgatagtggcattcttatttgtatatatgtgctttccttttttatttgtatcaaggcatttaaaatgaatatatgtaacatgtacctaagttttaaaagcataataaaatgaacacatctgaaaccacca

SEQ ID NO: 19 - DNA, 3339 bp, Homo sapiens
cagtggggcgttgtttcgtccgatatccgcgtttcagtctccgcccatacccctccgggttaggcggctgtagcggagctcgaaaagagtggcgcagggtcgcgcggccccgcctccttccccgcccagcgaagctctctgaccacccctcttttctagagttctgcctcgcttcccggcgcggtcgcagccctcagcccacttaggataatggcgacagctgaggtactgaacattggtaaaaaattatatgagggtaaaacaaaagaagtctacgaattgttagacagtccaggaaaagtcctcctgcagtccaaggaccagattacagcaggaaatgcagctagaaaaaaccacctggaaggaaaagctgcaatctcaaataaaatcaccagttgtatttttcagttattacaggaagcagttacctcatataagtcaaatcgtattaaaactgccttcaccagaaaatgtggggagacagctttcattgcaccgcagtgtgaaatgattccaattgaatgggtttgcagaagaatagcaactggttcttttctcaaaagaaatcctggtgtcaaggaaggatataagttttacccacctaaagtggagttgtttttcaaggatgatgccaataatgacccacagtggtctgaggaacagctgattgctgcaaaattttgctttgctggacttcttataggccagactgaagtggatatcatgagtcatgctacacaggctatatttgaaatactggagaaatcctggttgccccagaattgtacactggttgatatgaagattgaatttggtgttgatgtaaccaccaaagaaattgttcttgctgatgttattgacaatgattcctggagactctggccatcaggagatcgaagccaacagaaagacaaacagtcttatcgggacctcaaagaagtaactcctgaagggctccaaatggtaaagaaaaactttgagtgggttgcagagagagtagagttgcttttgaaatcagaaagtcagtgcagggttgtagtgttgatgggctctacttctgatcttggtcactgtgaaaaaatcaagaaggcctgtggaaattttggcattccatgtgaacttcgagtaacatctgcgcataaaggaccagatgaaactctgaggattaaagctgagtatgaaggggatggcattcctactgtatttgtggcagtggcaggcagaagtaatggtttgggaccagtgatgtctgggaacactgcatatccagttatcagctgtcctcccctcacaccagactggggagttcaggatgtgtggtcttctcttcgactacccagtggtcttggctgttcaaccgtactttctccagaaggatcagctcaatttgctgctcagatatttgggttaagcaaccatttggtatggagcaaactgcgagcaagcattttgaacacatggatttccttgaagcaggctgacaagaaaatcagagaatgtaatttataagaaagaatgccattgaattttttaggggaaaaactacaaatttctaatttagctgaaggaaaatcaagcaagatgaaaaggtaattttaaattagagaacacaaataaaatgtattagtgaataaatgcttctctagatccatattaataaacatgagcatctaacccctcctttcttaggctagacaccaagatatttcagccagcctttatcattcctcttactttatcctttttccttaagtattggtggtcactactattgagtttcttccttaacactgattaaatgatcttaactccctcagctaaaactggcattactgactcccagctatatttctccagacttgcatttttttttttttttttgagacagggtctcactgtcgcccaggctggagtgcagtggcgtgatctcagttcactgctgctttccctcctgggctcaagcagttctcccacctcagcctctcgactaacagggactataatcttgcagcaccatgccgagctaattttattttttgtagagatgagctctcactatgtcacccaggttcgtctcaaactcctgaaccctagtaattctcctatctcagcctcccaaagtgctagggttacagacatgagccactgtgcctgtctagacttgtactttcaactgtccatttctccctgtctgtcccatgggcactcatgaaaaaacagaatgctcccaactttattcatcttccaagcctgtagctcttggtatactcactgttgcaagtcagaagcttgatttcatcattgatgtttttctcacgtttcacatctcactcatcaccaagtcatgttggtgttaatttctgattaacccttgaatttaccgtcttctcatcctctgtacaaaagcctcaagtgagggtcaaattcaacattatcctgatctagacagcccccattctcaatccacccttttccaagttgattgcccaaggacttctaacaataaactctcttttgcaccacagacttctttgaaaatatacatgctgttgaccctctctgtagaaaaccgcacacataaaacttaccaacagatttcattggttcttgggttctcccgaagcctatccatggtttatagattaagaattgatgaggtagctgggcacagtggctcacacctacgatcacagcacttcgggaggctgaagcaagcagatcacttgaggtcaggagtttgagaccagcctggccaacatggtgaaaccctgtctctactaaaaatacaaaaagtagccagccgtgatgacaggcacctgtaatcccagctactcgggaggctgaggcatgagaattgcttgaacccgggaggcggaggttgcagtgagcctagatcatgccactgcactccaacctgggcagcagagcaagactctgtctcaaaaggggaaaaaaaaaattgctgatgtgacccatgaagggaactcattttcctcgtaattttggactgccacacattggtacctttagttctctgaaggcccacgtttttatcattaagacctatttgttagctagtagagctttatgttcgctgtccatgaaaccttctgtaaccacagtgactacaagtagttctttctctattgaattattaggtccagaatagaagatgtcattgtacactttatttccctcacactgtgttatgctctgatgtgctatgcttagctatctgtcagagattagtaaattataaaactcatgtgtactacttaagtttatatcttatgctagtttataagaacaattaaaaggacttagaagattaactttggt

SEQ ID NO: 20 - DNA, 2352 bp, Homo sapiens
ccggaagtggggcggcgaccccggaagtccccgccgggtgcagcttggtcggttcgatcgccgccgggacctgacaccgcccggagttggcgtcccttctccctctccgagtgctgctcctgtcattgtggccatggacgataccctgttccagttgaagttcacggcgaagcagctggagaagctggccaagaaggcggagaaggactccaaggcggagcaggccaaagtgaagaaggcccttctgcagaaaaatgtagagtgtgcccgtgtgtatgccgagaacgccatccgcaagaagaacgaaggtgtgaactggcttcggatggcgtcccgcgtagacgcagtggcctccaaggtgcagacagctgtgactatgaagggggtgaccaagaatatggcccaggtgaccaaagccctggacaaggccctgagcaccatggacctgcagaaggtctcctcagtgatggacaggttcgagcagcaggtgcagaacctggacgtccatacatcggtgatggaggactccatgagctcggccaccaccctgaccacgccgcaggagcaggtggacagcctcatcatgcagatcgccgaggagaatggcctggaggtgctggaccagctcagccagctgcccgagggcgcctctgccgtgggcgagagctctgtgcgcagccaggaggaccagctgtcacggaggttggccgccttgaggaactagccgtgccccgccggtgtgcaccgcctctgccccgtgatgtgctggaaggctcctgtcctctccccaccgcgtcttgcctttgtgctgaccccgcggggctgcggccggcagccactctgcgtctctcacctgccaggcctgcgtggccttagggttgttcctgttcttttaggttgggcggtgggtctgtgtcctggtgttgagtttctgcaaatttctgggggtgatttctgtgactctgggcccacagcggggaggccaagaggggccctgtggactttcacccagcactgtgggggccttcagactctggggcagcagacatgctgcttcccatcagccagagggggtcagggctgccctgttgccaaacaactccctgaggcctctccgcaccacctcagcgggcaggaggtcccaccatgtggacagacatagcccaaggaggcaccacaggtctatgtgtgctgggggatgtcaggtgccacccaacgctgtcctggtggtatttacaatgacatcctcctcctccatcactccaggggtggtgtctcggccgcccctaccagctggctgagccccctggcctcctgcgctccctcacttccctcagttcccaaagctgcccagtccatggggacagaaccgtcactcagatccacattcaagtgtgcccaccctgcagtcttcatcctcactcagctgctgcctctggaggtgcctttggccacatgtgctgtgctgtttgtctcctcgacagggagcctgtccaccagcaggctgcggtcccagcgggtgcgtctgcagctcctccccttgggcagcctggttctcccggaggacctttccttggggccctgcttcatgacgatgctgcctgtgtcaccctctaccatctgtaaacaactgggtgccttccccgaccacaccccaatgccttcccagcttggaagccaaggcagctgatgaagggagctcaggagagccgtcttcagctgggctggggttggggctgctgtgaggaaaacctgccattgtggccctggagagtcaccagcagctcttgggaaggacttgctgggaggctgagagaggctttgggcacagcctgctgtcttttccatttcctaaagtttacttcattgtcttgaggcttccaggttttgtttttgtttttgccaaagtagaaaaggcaggtggtgggcggctggcagggagtgcgggtccccgcccctcttcagtcctgccctcccctcctcagtcctgcccaccccgtgcagcccatgctgaggctgcagtggtgtcgtgggtgttacgtgcaggaacgtggagaccctgacgtgggctcactgcgtttggttttcttttcagaacttgggagcccccagggaggggctagtgttggtaggtcctagacgtggttccctccagcctccccaaaatcaaccctggtgttgagagaacgtccttctgtccatcgtgggtaacagccttggggagggtgcagagctctgcagagccatgggccaggtggggctgcctcagtcctgtccccttgggcactgaggagaggggcccattcacctttctcctagaatgctgttgtaaataaacaaatggatccctgg

SEQ ID NO: 21 - DNA, 5913 bp, Homo sapiens
gtggacgcagcgggctttggaaaggccccaagttaatgaggcgtgcgccggctgccgagcgcctcttggagctgggctttcccccgcggtgcgggcgccaggagccgccttttccgctgggtgtcactcgggggtggggaagatggcccattcaaaagcgccgcgagggggcccggccagtgcccttcagtgagcgctcgcaagaggacggcagaggcccggcagctcggagctccgggaccttgtggcgcatcaggacgcggctgtccctctgccgggacccagagccgccgccgccgctctgcctcctgcgtgttagcctcctctgcgcgctccgggcaggcggccgtgggagccgctggggcgaggacggcgcgaggctgctgctgctgcccccggcccgcgcggctggaaacggagaggccgagccaagcggcggcccctcttatgctgggaggatgctggagagtagcggctgcaaagcgctgaaggagggcgtgctggagaagcgcagcgacgggttgttgcagctctggaagaaaaagtgttgcatcctcaccgaggaagggctgctgcttatcccgcccaagcagctgcaacaccagcagcagcagcagcaacagcagcagcagcagcagcaacaacagcccgggcaggggccggccgagccgtcccaacccagtggccccgctgtcgccagcctcgagccgccggtcaagctcaaggaactgcacttctccaacatgaagaccgtggactgtgtggagcgcaagggcaagtacatgtacttcactgtggtgatggcagagggcaaggagatcgactttcggtgcccgcaagaccagggctggaacgccgagatcacgctgcagatggtgcagtacaagaatcgtcaggccatcctggcggtcaaatccacgcggcagaagcagcagcacctggtccagcagcagcccccctcgcagccgcagccgcagccgcagctccagccccaaccccagcctcagcctcagccgcaaccccagccccaatcacaaccccagcctcagccccaacccaagcctcagccccagcagctccacccgtatccgcatccacatccacatccacactctcatcctcactcgcacccacaccctcacccgcacccgcatccgcaccaaataccgcacccacacccacagccgcactcgcagccgcacgggcaccggcttctccgcagcacctccaactctgcctgaaaggggcagctcccgggcaagacaaggttttgaggacttgaggaagtgggacgagcacatttctattgtcttcacttggatcaaaagcaaaacagtctctccgccccgcaccagatcaagtagtttggacatcaccctactgaaaacttgcgattcttcttagttttctgcatacttttcatcacgatgcaggaaacgatttcgagtcaagaagacttttatttatgaacctttgaaaggatcgtcttgtatggtgaattttctaggagcgatgatgtactgtaattttattttaatgtattttgatttatgattatttattagtttttttttaaatgcttgttctaagacatttctgaatgtagaccattttccaaaaaggaaactttattttcaaaaacctaatccgtagtaattcctaatcttggagaataaaaaagggcggtggaggggaaaacattaagaatttattcattatttctcgagtactttcagaaagtctgacactttcattgttgtgccagctggttgaaattaaaactctgatattactttttttgaggatttttatttttgtttttgcttaaacatatagtttgtctagaagtttaaaaagctaaaagttaaaaatggtgtaattatgaaaatctaacactcaagatagtttctaaaaggaaatcagtagttaaggatacctgatttcaaaatatttaaagcataacctaactgatggtaggatgattgtatcttgaatatgtggtagggccacatctattgtaggaaaaccttgcttttatcatctgtgtgtaaagggcttaataaggagaagaggccttttgactgatttgtgagtataaatgcatttgctgtttcatttcaaaaatgttgtggaggaaaagagtacatttaacttgtataagagaatatttgtactcctgtccaggctgcaggacctttcttcgagagctttgcacacttgacttgaaccacattttctgatccctttactttgttttagaagcacactgaaaaatctcgttgtttaaagtacaatttgtaaatatttcaaaggtctaggagtcataacttttgttttcatactgaaaatgatgttgatcagagaaaccaactgttttgcttttcattgctctgtgagaaatttgaggattctgttttgctgttaggtaagctaaactcagaaattgaaaaggaaaagactggataaacacaggattttcagtaagaaaacaaccccagtcttgtcttagaagccacttgttgaggagtctgttgggggaaaaaagaggatatgcttttaaaggtagaacaaaccttcttctgtgttaaatcaaaaggatgttcaaaatccaccaggacagatgctacttgggtttaaatggagccatagatgatacaaagtcctcttggggctgaaaatcacttcctatttgcatggctttactaactggtttctgttttccattatctttttcacagaaagtcttggtcagtatttttccagcatttaaattgaaacggtcagtattagaccactgctaggttatgtagtcaagaaataaaaatagaattacatgctacagatgtctttattctccttccatctagaaaggagttccaaggtcaaattactttttagtgcaatagttaaatgacattttgagatcataactcatatccaaaaagttgcagggaaaattaaaatagctttcccctattaagctaatggcaaacaaaacttaagtggacccccacttccagtggttgtttaggttgcagttgtgaaaatatgctgccaacatttaaaaacttgtttcatatgtatatatgtatacacatatatgaatatgtatgtatatatacatatatgagaacatgtgtgtacacatatatgaatatgtatatatgtgtatgtatgtatatatgtatatgaaatgagagccacatctaaagatttcttaaatcaagtttggttcagcttccttagaactgtggctgtactttttgaggagtacctcatagtactatatttttaatgcatgcaaatcataatagctccaaatgaaccacagttttttcccaatggaggatttttttttaattcttgtactaaaaaaaaaaaatccataccaaatatttttacaaattaagattgatgtaggttttaaaaaaggcatttgtatgttgttagcttacatatggggctaggtaatttcattgcttaaaaagatgcgcctaggctccctcttggtggctggatttctttttcttcgcccgtggtggccatggttcttaatagggccaccggaatcatggtttctttttttttttttttttttgagatggagtctcgccctgtgacccaggctggagtgcagtggcacgatctcggctcactgcaacctctgcctcctgggttcacgccattctcctgtctcagcctcctgagtagctgggactacaggtgaatgccaccacgcccggctgatttttgtatttttagtagagatggggtttcaccatagtggtcaggctgttctcgaactcctgacctcaggtgatccacctgccttggcctcccaaagtgctaggattacaggtgtgagccaccacacccggccccagaataatggtttcttgactttctgtagcccttgttccttagtctgctgtgatatttatgttgacctttatcattttctattctgaacccctcttagcatttaatgtgaaatctaagaaattagaagtagaatggcttttattgttttgacacctttgaaattattattaataatttttccagagcaaaaaagcaaacacgctcaataagactaaacaaaacaaaatataaatgtacatcatttaatgtcccagtggctctattctacctgtaagaaaatgatacaaaaccacctaagatattttgaagcctgacaaatcagcttcatggaaaaaggtaaaaaatgcatttttcaaccgaaagggcagatccaatagaagacccgctccttaaataaacataaaatgtaaaaagttggaaaattaagagtaatgttccatctggaaactgaacttttgtccttgaacttgtgttggcaccaagcctcatacacagtgagctcaataactgttgggacaaaggaaggaaggacaaaatgtgtaacttcccagcatctgggagatgctgtctcttgcctcactgagtgttccttttctttgctctcatgtcattccctgagaacaatgaattctgggacaggctaaacatcatgatgaagtttcttaaacagactttcttagtggaaatccatttagatctgggtgtgctctatggggagtgctgacgtcaaagagcaaatgtctataaggggcccttttaaaatgaacattttcctcattgagcaagctgggattctctaatgtagaaatcaagccatctttataatttcacttcagatgtttatgtttttgttttttttgtctccaatgatggtaaaaataaaaactacgcattacttaaaggagtttccctcacatgtaaacactgttaggaagtctggattaagttgaaagtcctgttttaactttttttctctcatataccaaacactctgtatttctcttaaagaagccctttaagagaaagccctaattttatatctgacagtaaagtttgctgcaagtgtatgagttcaaacacatcccttgttttctgtccctaggggaaaagtcatgtagttttagcttggctccagtgttaatattatattcagtagcagccttagaagagtggtctaagacttgaacctggagcaattttatagcacagaatcctacgaagataggactgtgaacatttgttttctttttcgtgtgtgtcaaactaactggtttttgctttaccaataaaatgtcctcggcagagtaaattttaaacgtgaaaattatagatcttgatattgaatccatcagtgattcaagagatacacctatttgcctaaaacaacctaagatgtattggttatggaatcatgtgttggataggttcttaagacctgtttcctcaaatcttgacacagttttcaagggtggcttattgacttgcacggttgggcagataatccagatttacctaagattgggtaaaaaagtcatctgtgactttgctggcagggcatttgctaagtggagtacaggatctaaaagggttttcttagaaagggcaatattgtccaatgaagtaagcagaaggactctgggttagaagcatctgcacaaaaactggtgagacctactctccactgctctgcagctggatggctgatggcaggctgagcagtggggaagcaggttttaacaacagggagtccttccaggtcactgtatattgagaagaaacataaaactattgtctgttacattccgaggtcagccttcttcttaacgttttataatatgcaaatgccagcttctggaaagcaagtatcatcatgtaccaaatgctttatacaccatcacattcatgaattttttagcatggtcagaacttgtgtaaatatgtctcttagatgattttggggagatgtgatttatttttcatattttcaaaatgcatttcatttcaaataaagttatctattgagacaaccga

SEQ ID NO: 22 - DNA, 4645 bp, Homo sapiens
ccagaaggctccatattctcaacatgtgcaggtcaatttgacataaagctaccaacaaggagcaacaggcccactgcaggctgtgtttataacttgaaaattatgagcaggtattgggagccacagactgtatttgggaaccagctgcatgtcaggacaagcatagattgtggtctgtggaggctgggagagcacaatgcttgaatttcatttctttgggagataagaagaaaaaataccttcctacctgacaagattgacaacttgctaaatctgattatcttcagaagtgtgctggacagttgcgaagtaaacatttacttttcaaagatgatgatcaaggaaacatctctacgaagggacccggatttaaggggagagctagctttcctggcaaggggctgtgattttgttctcccttcacggtttaagaagcggctgaagtcatttcagcagacacagattcaaaataaaccagaaaagaaacctggaacaccactcccacctccagccacctctccaagtagtccccgacctctctccccggttccccatgtgaataatgttgtgaatgcgccattgtccataaacattccacggttctactttcctgaaggactcccagatacctgtagtaatcatgaacaaactctaagcagaattgaaactgctttcatggatattgaagaacagaaagcagacatttatgaaatggggaaaattgcaaaggtctgtggctgtcctctctattggaaagcccccatgttcagggctgcagggggagagaagacaggatttgtgacagcacagtcattcattgccatgtggagaaagttgctgaataaccatcatgatgatgcctctaaattcatctgtcttctagcaaagcccaactgcagctctctagaacaggaggatttcatccctctacttcaggatgtggtggatacccaccctggtctcacgttcctgaaagatgctccagaattccactcccgctacatcaccacggttattcagagaatattctacacagtcaacagatcttggagtggaaaaattacttcgacagagataagaaaaagcaactttttgcaaaccctagcacttttggaagaagaggaagatataaaccaaattacagattacttctcctatgaacatttctatgttatttattgtaaattctgggaactagatactgatcacgacctctacatcagccaggccgatctgtctcgatacaatgaccaggcttcatcaagcaggattattgaaaggatattctctggtgcagtaacaaggggaaaaacaatacagaaagagggaagaatgagctatgcagattttgtttggtttttgatctctgaagaagacaaaaggaatcctaccagcattgagtattggttccgctgcatggatgtggatggagacggtgtactctccatgtatgagctggagtacttctatgaggagcagtgtgaacggatggaagccatgggaattgagcccttgccattccatgatttactgtgccagatgcttgacctagtgaagccagctgttgatggcaaaataactctaagagatctgaagaggtgcagaatggctcacatcttctatgacactttctttaatctggagaaatacttagaccatgaacagagagatccctttgcggtccagaaggatgttgagaacgatgggcctgagccctcagactgggaccggtttgccgctgaggagtatgagacgcttgttgcagaggaatctgcccaagcacaattccaggaaggctttgaagattatgaaacagatgaacctgcctctccctctgaatttggaaacaaaagcaataaaatattaagtgcaagccttccagagaaatgtggaaagcttcaatcagtggatgaagaatagctgccggtgtctacaatgaaacgaagatgtgtattttaaatgtttctttcttgtgaagagatgttctcgtttgcatactgctttttaaagactttgatttctccaagtgtgtatcatctgcactaggaactttgtttttaagcaataggtctggatacacatttaacttaggaggctcctccaatttgcctcaaacctcttacggagcttctcctcagaagtggtaccatcgccttccaaagtcagcactctacactcttgaatgtaccaaggatctcttggcgacagtaccaagcacggttctctacacaggtgactgaagttgcctctgtgttggctggcatccctgagtcccctccgggctcctatggagcctagaagaaaccttcacttgcagaaaacttgagtcagaaaattctggaacttgaaaaagtagtaagggcctccagaattgacttagccctagtaataaaagcactgccaaaacatctcagagacttcttttatgtatactggagttcaaagatctttaacttacctggcttaatgtaatttcacagttacctgccaaactactagtcactttacatcctcaggtattgtaaccactgggccttccaactttgctggcaagctctggtaacctccctgactgtggatcttatataaaatctcaagataaaaaaacacttcttaaatgaagtatagaatttgactcatacttggaaaaagcccttttaacttttatcttttattcattgaactattgaatgatgtatttaatatccaaattagttgataactgttttcacttcctatcagaaggcctgcttgaagacataaaggaataatgatacattaaaattcttactagatagatatattccttcctcccaggagtattagactagctaatagtaaaggcctcaacgttattctttacttcatgttgaaaacaattactacagatatttcatccacctcagtatttatcaaggaaatggaaaatgatacagctataaaagaaagctgttatttactgtagttgtagatgtattcactacagaatcctacatttttcagcaggccacagtccagccaaatcctataatatccttgaaaagaaactattaaaaaggatagacatttctgatgtaagtaaaacccccaagcaacttaatatccatctgtcagtcatcaacttttcccctagattttttttttaactagttctgaaagtgtcaagaatagcttccctttccaccctacctaggttccctccttgctggcataaaggccaagcagtgaaatgaaccttgggttagagttatggtaggcaaaaagaaaaggagaatttaggaaataaatatgctataaacaaggtacagtacagtgagagttaacaatcctaggaatcctgcctgtcacaagctcccagttccctgtcattttatcttcatgattagaactgatcttccatttaactattacagaaagcagtaactattgcaactatctaatagttcacacaaaagaattaaaagcttaaaaataatttttaggaaacacaatattcaaaatctaaacacactgataaattattaagattaagattatttatgtgataaatgaaatctcctaccaatccatccagcctttaccagggaagaaaagcaattatttcatttcagatagaaatacaaaaaaaaaaaaaatacttttcttagaagccagatatggtttaaatgttttattatccataatgatctaaactaataagattcaccaaaaagtaaaaattcaattttacaatatacatttttttttttaactatttggctttacctttttaccttggttctccttactgaagtcctcttgctttcactttgatctggtttttgaagtctcttaattattggctgggcatggtgactcatgcctgtaatcccggcactttgggaggccaagggaggtgatcacttgagcccaggagtaaagaccagcctgggcaacatagtgagactccgtctctacaaaaaataaatttagctgggcatggtggtgcacatctgtagtcctaccaacttgggaggctgaggcaggagaatcgcttgagccccaggcttcgaggctgcagtgagctatgattacgacactgcactccagcctaggcgacagagcaagaccccattctcttacaaagtctctattataaaagtacatccatcaataccattccatttaaaatgggctattgtaatttacccacattatcacattttcaggaattataagaatgtgttttattgtactccttccttggagctgaatgcaaggaatgtgaattctgaggaattaaggtagaatatatttgactttctggtaaagatcatggttaagtataatcattactgccaaactggaattttcaagttattataatatcccaggccccttgataaaagctgagggttatcatgaccttaatgctaattcaatgagaaatgagtttaatagcataacattaccaaggtaatcaaactaataaaattccatatatcttccctgcatcttgtcactgtgtaccattcaaagtgtttataaaactctagattcatcaaatgagatttgctcagctttttgaaatgttaagatgtgtttggagaaggctgcatgactttgtttttcccttttagcaaaactaaataaagttgtcaaatat

SEQ ID NO: 23 - DNA, 1787 bp, Homo sapiens
gctgctcctctgtcgagctgatcacacccacagttgagctgcgctggccagagatgcctgcccacagcctggtgatgagcagcccggccctcccggccttcctgctctgcagcacgctgctggtcatcaagatgtacgtggtggccatcatcacgggccaagtgaggctgcggaagaaggcctttgccaaccccgaggatgccctgagacacggaggcccccagtattgcaggagcgaccccgacgtggaacgctgcctcagggcccaccggaacgacatggagaccatctaccccttccttttcctgggcttcgtctactcctttctgggtcctaacccttttgtcgcctggatgcacttcctggtcttcctcgtgggccgtgtggcacacaccgtggcctacctggggaagctgcgggcacccatccgctccgtgacctacaccctggcccagctcccctgcgcctccatggctctgcagatcctctgggaagcggcccgccacctgtgaccagcagctgatgcctccttggccaccagaccatgggccaagagccgccgtggctatacctggggacttgatgttccttccagattgtggtgggccctgagtcctggtttcctggcagcctgctgcgcgtgtgggtctctgggcacagtgggcctgtgtgtgtgcccgtgtgtgtgtatgtgtgtgtgtatgtttcttagccccttggattcctgcacgaagtggctgatgggaaccatttcaagacagattgtgaagattgatagaaaatccttcagctaaagtaacagagcatcaaaaacatcactccctctccctccctaacagtgaaaagagagaagggagactctatttaagattcccaaacctaatgatcatctgaatcccgggctaagaatgcagacttttcagactgaccccagaaattctggcccagccaatctagaggcaagcctggccatctgtatttttttttttccaagacagagtcttgctctgttgcccaagctggagtgaagtggtacaatctggctcactgcagcctccgcctcccgggttcaagcgattctcccgcctcagcctcctgagtagctgggattacaggcgcgtatcaccatacccagctaatttttgtatttttagtagagacgggttcaccatgttgcccaggagggtctcgaactcctggcctcaagtgatccaccggcctcggcctcccaaagtgctgggatgacaggcatgaatcactgtgctcagccaccatctggagttttaaaaggctcccatgtgagtccctgtgatggccaggccaggggacccctgccagttctctgtggaagcaaggctggggtcttgggttcctgtatggtggaagctgggtgagccaaggacagggctggctcctctgcccccgctgacgcttcccttgccgttggctttggatgtctttgctgcagtcttctctctggctcaggtgtgggtgggaggggcccacaggaagctcagccttctcctcccaaggtttgagtccctccaaagggcagtgggtggaggaccgggagctttgggtgaccagccactcaaaggaactttctggtcccttcagtatcttcaaggtttggaaactgcaaatgtccccttgatggggaatccgtgtgtgtgtgtgtgtgtgtgtgtgtgtgtgtgtgtgtgtgtgtgtgttttctcctagacccgtgacctgagatgtgtgatttttagtcattaaatggaagtgtctgccagctgggcccagca

SEQ ID NO: 24 - DNA, 5081 bp, Homo sapiens
gatgaccgtggttaaggcagtagaaagcaggctcgacactgagacgcggttccagccctagaaggattgcattttacgattcaggcaaacttcgagtctcctcatgtgacatgtgtgcactcctggaccgttttaattatgagaaacgtggtttgcagcatgattccttccagtcgataaatcggaatctctctcgctcccaccccttcttaacttcaggcttcctgcatcccggagcactcccggcagccccttccctcccccgccccggggatgctccgactcggcgcttagccattcatcaaccggttcacaccggcggcggccgccgcggagtgacgtccggagggggcgggcctccgcccccgcctgtcggctcctggcccgcggttccaggccgcgattggtggctggagggttgcacgtcgcgccggctataaaggggagggcttgtgacgcaagggcgcctcggcgcgtgtattggctccttcggctgcgggccggctcggctacgcgctctgctccgagccgctcactgcatggtagagtctggtgcccccgccgccgcctgcatcgccgccaccgccgctccgccacgaccaccgccgcctcctgccctgcagccaccgccaccgcctgtgtcgccgccgcctcgggaccggctgtatgattaggccacaatcttcaatgagtaaacatattcctcaattctgtggtgttcttggtcacacatttatggagtttctgaagggcagtggagattactgccaggcacagcacgacctctatgcagacaagtgaactgtagaaactgattactgctccaccaagaagcccccataagagtggttatcctggacacagaagtgttgaattgaaatccacagagcattttacaagagttctgacctggatggggtaaacctcagtgcacttcttttctgttggcctcagtattactggattgaagaattgctgcttcttgttaggaggttcatttcacttatcattacttacaacttcatactcaaagcactgagaatttcaagtggagtatattgaagtagacttcagtttctttgcatcatttctgtattcaatttttttaattatttcataaccctattgagtgttttttaactaaattaacatggctcgaatgaaccgcccagctcctgtggaagtcacatacaagaacatgagatttcttattacacacaatccaaccaatgcgaccttaaacaaatttatagaggaacttaagaagtatggagttaccacaatagtaagagtatgtgaagcaacttatgacactactcttgtggagaaagaaggtatccatgttcttgattggccttttgatgatggtgcaccaccatccaaccagattgttgatgactggttaagtcttgtgaaaattaagtttcgtgaagaacctggttgttgtattgctgttcattgcgttgcaggccttgggagagctccagtacttgttgccctagcattaattgaaggtggaatgaaatacgaagatgcagtacaattcataagacaaaagcggcgtggagcttttaacagcaagcaacttctgtatttggagaagtatcgtcctaaaatgcggctgcgtttcaaagattccaacggtcatagaaacaactgttgcattcaataaaattggggtgcctaatgctactggaagtggaacttgagatagggcctaatttgttatacatattagccaacatgttggcttagtaagtctaatgaagcttccataggagtattgaaaggcagttttaccaggcctcaagctagacagatttggcaacctctgtatttgggttacagtcaacctatttggatacttggcaaaagattcttgctgtcagcatataaaatgtgcttgtcatttgtatcaattgacctttccccaaatcatgcagtattgagttatgacttgttaaatctattcccatgccagaatcttatcaatacataagaaatttaggaagattaggtgccaaaatacccagcacaatacttgtatatttttagtaccatacagaagtaaaatcccaggaactatgaacactagaccttatgtggtttattccttcaatcatttcaaacattgaaagtagggcctacatggttatttgcctgctcactttatgtttacatctcccacattcataccaatatacgtcaggtttgcttaaccattgatttttttttttttttaccaagtcttacagtgattattttacgtgtttccatgtatctcactttgtgctgtattaaaaaaacctccattttgaaaatctacgttgtacagaagcacatgtctttaatgtcttcagacaaaaaagccttacattaatttaatgtttgcactctgaggtgcaacttaacagggagggcctgagaaaagaatgggagggggctattaattatttttagcaaaatgttgcctttgtcttgtgcaaacatgtagaatatgctctttaatttagtaaaatatttttttaaaaggtagagatgctttgttattgtaatcataaacttcctgaaattcttgtaatttttttcccatacttatcagaagtgtgtttaccaacttatttttgtttgaaagtgtgattttttttttccttcccaacctctcttgcaaaaaaagaaatgggtttctgctaatgaattgagcagacatctaatattttatatgccttttgagctgtgtaacttaatatttggatacttgacaatttgttttattatgtaattgataaaatggtgatgtgtattaatgttagttcaaccatatatttatactgtctggggatgtgtggttatagttctgtgggagaaataattttgtcagtgttcaccagcttgtaaaaacttagtgcgagagctgaaacatctaaataaataatgacatgcatttatcatcattgagattggtttgcttaaaattaacttattttgtagaagacaaaatgaattgcacttcacttaatgtgtgtcctcatctttttacaaataaatgaaggattataaatgatgtcagcattttagtaaacttttagacaaaatttgttagggtcattcatgaaaactttaatactaaaagcactttccattatatactttttaaaggtctagataattttgaaccaatttattattgtgtactgaggagaaataatgtatagtagaggacagccttggtttgtaaagctcagttccactagttcatggttttgtgcaacttctgagcctcagttttctcctttgcaaattaataattacatacctttatagattttgaaattaatttaaatattagtatttggtacatgaaggcttaatgttaagtttcctttaatgatccacaataatccctttgatcacgttaatctaaatctagatgtctttgtctaattttttttgaatagcagttataaatgtaaaggactcaaagtttaagtaaaaagtgatactccaccttgtgtttcaaagaatttagttccacctcttcataccagtttaacacttaatatatttcattggattttagacagggcaaaaggaagaacaggggcctctggaggcccttggttatttaaatcttggattatttgtgatagtaatcacaaatttttggctaatttttaacctgaggttttgttttttttttaaaggaaatgcagcctagtcttgagaacataattttatataatcaattactaaatgttaaactattaccacacagcccataaaacagcatttgcgtttattgagagagaggatgtgccatcatgattaatgaaaactatcttttgagtttgaaaagaaattaatttgcagtgtttggattgtatatatggtgctaaaaataaattaatttactttataaaccttatctgtacattatacgatgtgatgaaatttgctttttatccaaatattttgtatcttgtaaatatggctaattataggaatgcctataatacatcttagattccttatatctaataagagttcaaagagttatgagttgaagtcttgaatgcaggaaactatctgatagtgttctaaaatttggttacttgggtttggatacccttagtgggatgatgtaaatagaggctagctacctaggcttgtctatagcaaccataatgttgatgtaagtaatgcggttactgaatcataagaaaatgccatctctttttagttgaaggaaaactctggaagtaggtgccattggtcattctgcagtgcactgcaaccattgtttcccctagtgccctcttttccctagggcattgctctcctattcccacgccttaacacagctctatacctagaagcagccagcccaggcatgcagtcacatttaatcacatcccccttctagagtgcttcaaaatgatgtagtccctcaacttggctaaagaatctcaatctcttgaaatttatttttttaatgtcatattcatctggtaaatatctactgtttgccaggcatttaagaatatggcaaagaacataaaagatggtgtcaccagattttggtcaccaatgagtacccgacccgttgccatgattaagagagaatgctttctattggagtttcaggaaatataatttgagaatactttaaagggaagtggaagtataagtgaatgatatttttcttttacatgtaaacaatgaagttatttcaaagttaagttttaaacaaaatacatgaagtagtgtctgccatacatgttaatattctacattcttgcttccttaaattaatatgtttgtgtgtatatatgtgcctcacacctgaattgaaaattaaagactggtttaaaagtggtttaaaagtgacatttaatgtttctccattacgtttggggtaaccagcctaagtggaatcttggaaggaaagtaagggaaaaacttgtatttgccttcaatgaattaaaccagtgatatgtgttaacgtatgaatgaaaggattgatggtgattttataattatatatattgccgcagtaaccagttaataaattgatagctacc

SEQ ID NO: 25 - DNA, 5467 bp, Homo sapiens
ggcaggacgaggtggcaccaaattcccttcggccaatgacgagccggagtttacagaagcctcattagcatttccccagaggcaggggcaggggcagaggccgggtggtgtggtgtcggtgtcggcagcatccccggcgccctgctgcggtcgccgcgagcctcggcctctgtctcctccccctcccgcccttacctccacgcgggaccgcccgcgccagtcaactcctcgcactttgcccctgcttggcagcggataaaagggggctgaggaaataccggacacggtcacccgttgccagctctagcctttaaattcccggctcggggacctccacgcaccgcggctagcgccgacaaccagctagcgtgcaaggcgccgcggctcagcgcgtaccggcgggcttcgaaaccgcagtcctccggcgaccccgaactccgctccggagcctcagccccctggaaagtgatcccggcatccgagagccaagatgccggcccacttgctgcaggacgatatctctagctcctataccaccaccaccaccattacagcgcctccctccagggtcctgcagaatggaggagataagttggagacgatgcccctctacttggaagacgacattcgccctgatataaaagatgatatatatgaccccacctacaaggataaggaaggcccaagccccaaggttgaatatgtctggagaaacatcatccttatgtctctgctacacttgggagccctgtatgggatcactttgattcctacctgcaagttctacacctggctttggggggtattctactattttgtcagtgccctgggcataacagcaggagctcatcgtctgtggagccaccgctcttacaaagctcggctgcccctacggctctttctgatcattgccaacacaatggcattccagaatgatgtctatgaatgggctcgtgaccaccgtgcccaccacaagttttcagaaacacatgctgatcctcataattcccgacgtggctttttcttctctcacgtgggttggctgcttgtgcgcaaacacccagctgtcaaagagaaggggagtacgctagacttgtctgacctagaagctgagaaactggtgatgttccagaggaggtactacaaacctggcttgctgatgatgtgcttcatcctgcccacgcttgtgccctggtatttctggggtgaaacttttcaaaacagtgtgttcgttgccactttcttgcgatatgctgtggtgcttaatgccacctggctggtgaacagtgctgcccacctcttcggatatcgtccttatgacaagaacattagcccccgggagaatatcctggtttcacttggagctgtgggtgagggcttccacaactaccaccactcctttccctatgactactctgccagtgagtaccgctggcacatcaacttcaccacattcttcattgattgcatggccgccctcggtctggcctatgaccggaagaaagtctccaaggccgccatcttggccaggattaaaagaaccggagatggaaactacaagagtggctgagtttggggtccctcaggttcctttttcaaaaaccagccaggcagaggttttaatgtctgtttattaactactgaataatgctaccaggatgctaaagatgatgatgttaacccattccagtacagtattcttttaaaattcaaaagtattgaaagccaacaactctgcctttatgatgctaagctgatattatttcttctcttatcctctctctcttctaggcccattgtcctccttttcactttattgctatcgccctcctttcccttattgcctcccaggcaagcagctggtcagtctttgctcagtgtccagcttccaaagcctagacaacctttctgtagcctaaaacgaatggtctttgctccagataactctctttccttgagctgttgtgagctttgaagtaggtggcttgagctagagataaaacagaatcttctgggtagtcccctgttgattatcttcagcccaggcttttgctagatggaatggaaaagcaacttcatttgacacaaagcttctaaagcaggtaaattgtcgggggagagagttagcatgtatgaatgtaaggatgagggaagcgaagcaagaggaacctctcgccatgatcagacatacagctgcctacctaatgaggacttcaagccccaccacatagcatgcttcctttctctcctggctcggggtaaaaagtggctgcggtgtttggcaatgctaattcaatgccgcaacatatagttgaggccgaggataaagaaaagacattttaagtttgtagtaaaagtggtctctgctggggaagggttttcttttctttttttctttaataacaaggagatttcttagttcatatatcaagaagtcttgaagttgggtgtttccagaattggtaaaaacagcagctcatagaattttgagtattccatgagctgctcattacagttctttcctctttctgctctgccatcttcaggatattggttcttcccctcatagtaataagatggctgtggcatttccaaacatccaaaaaaagggaaggatttaaggaggtgaagtcgggtcaaaaataaaatatatatacatatatacattgcttagaacgttaaactattagagtatttcccttccaaagagggatgtttggaaaaaactctgaaggagaggaggaattagttgggatgccaatttcctctccactgctggacatgagatggagaggctgagggacaggatctataggcagcttctaagagcgaacttcacataggaagggatctgagaacacgttgccaggggcttgagaaggttactgagtgagttattgggagtcttaataaaataaactagatattaggtccattcattaattagttccagtttctccttgaaatgagtaaaaactagaaggcttctctccacagtgttgtgccccttcactcatttttttttgaggagaagggggtctctgttaacatctagcctaaagtatacaactgcctggggggcagggttaggaatctcttcactaccctgattcttgattcctggctctaccctgtctgtcccttttctttgaccagatctttctcttccctgaacgttttcttctttccctggacaggcagcctcctttgtgtgtattcagaggcagtgatgacttgctgtccaggcagctccctcctgcacacagaatgctcagggtcactgaaccactgcttctcttttgaaagtagagctagctgccactttcacgtggcctccgcagtgtctccacctacacccctgtgctcccctgccacactgatggctcaagacaaggctggcaaaccctcccagaaacatctctggcccagaaagcctctctctccctccctctctcatgaggcacagccaagccaagcgctcatgttgagccagtgggccagccacagagcaaaagagggtttattttcagtcccctctctctgggtcagaaccagagggcatgctgaatgccccctgcttacttggtgagggtgccccgcctgagtcagtgctctcagctggcagtgcaatgcttgtagaagtaggaggaaacagttctcactgggaagaagcaagggcaagaacccaagtgcctcacctcgaaaggaggccctgttccctggagtcagggtgaactgcaaagctttggctgagacctgggatttgagataccacaaaccctgctgaacacagtgtctgttcagcaaactaaccagcattccctacagcctagggcagacaatagtatagaagtctggaaaaaaacaaaaacagaatttgagaaccttggaccactcctgtccctgtagctcagtcatcaaagcagaagtctggctttgctctattaagattggaaatgtacactaccaaacactcagtccactgttgagccccagtgctggaagggaggaaggcctttcttctgtgttaattgcgtagaggctacaggggttagcctggactaaaggcatccttgtcttttgagctattcacctcagtagaaaaggatctaagggaagatcactgtagtttagttctgttgacctgtgcacctaccccttggaaatgtctgctggtatttctaattccacaggtcatcagatgcctgcttgataatatataaacaataaaaacaactttcacttcttcctattgtaatcgtgtgccatggatctgatctgtaccatgaccctacataaggctggatggcacctcaggctgagggccccaatgtatgtgtggctgtgggtgtgggtgggagtgtgtctgctgagtaaggaacacgattttcaagattctaaagctcaattcaagtgacacattaatgataaactcagatctgatcaagagtccggatttctaacagtccttgctttggggggtgtgctgacaacttagctcaggtgccttacatcttttctaatcacagtgttgcatatgagcctgccctcactccctctgcagaatccctttgcacctgagaccctactgaagtggctggtagaaaaaggggcctgagtggaggattatcagtatcacgatttgcaggattcccttctgggcttcattctggaaacttttgttagggctgcttttcttaagtgcccacatttgatggagggtggaaataatttgaatgtatttgatttataagttttttttttttttttgggttaaaagatggttgtagcatttaaaatggaaaattttctccttggtttgctagtatcttgggtgtattctctgtaagtgtagctcaaataggtcatcatgaaaggttaaaaaagcgaggtggccatgttatgctggtggttaaggccagggcctctccaaccactgtgccactgacttgctgtgtgaccctgggcaagtcacttaactataaggtgcctcagttttccttctgttaaaatggggataataatactgacctacctcaaagggcagttttgaggcatgactaatgctttttagaaagcattttgggatccttcagcacaggaattctcaagacctgagtattttttataataggaatgtccaccatgaacttgatacgtccgtgtgtcccagatgctgtcattagtctatatggttctccaagaaactgaatgaatccattggagaagcggtggataactagccagacaaaatttgagaatacataaacaacgcattgccacggaaacatacagaggatgccttttctgtgattgggtgggattttttccctttttatgtgggatatagtagttacttgtgacaagaataattttggaataatttctattaatatcaactctgaagctaattgtactaatctgagattgtgtttgttcataataaaagtgaagtgaatctgattgc

SEQ ID NO: 26 - DNA, 5546 bp, Homo sapiens
gtcacccgtaacaaccacaagtgccgtcgccgcgccccttccccctcccgcctccccggccccctccccggaaccggcggtcgagctacggtcgcggagcagtggaaccgagactgccccgcggagccgccggtatgagcgcccctcgccaccccgtgtcccaggcccggcctttctgacaagagctagacttcgggctccttgaggatattcagttttgtatgtttgaatatcctctcaccatgttcagcataaagtaccattcttaatgattatcctcaacaagacaggtgtgagagggttgctgttgtattgcaatcatggtgcagaaataccagtccccagtgagggtgtacaaatacccctttgaattaattatggctgcctatgaaaggaggttccctacatgtcctttgattccgatgttcgtgggcagtgacactgtgaatgaattcaagagcgaagatggggctattcatgtcattgaaaggcgctgcaagctggatgtagatgcacccagactgctgaagaagattgcaggagttgattatgtttattttgtccagaaaaactcactgaattctcgggaacgtactttgcacattgaggcttataatgaaacgttttccaatcgggtcatcattaatgagcattgctgctacaccgttcaccctgaaaatgaagattggacctgttttgaacagtctgcaagtttagatattaaatctttctttggttttgaaagtacagtggaaaaaattgcaatgaaacaatataccagcaacattaaaaaaggaaaggaaatcatcgaatactaccttcgccaattagaagaagaaggcataacctttgtgccccgttggagtccgccttccatcacgacctcttcagagacatcttcatcatcctccaagaaacaagcagcgtccatggccgtcgtcatcccagaagctgccctcaaggaggggctgagtggtgatgccctcagcagccccagcgcacctgagcccgtggtgggcacccctgacgacaaactagatgccgactacatcaagagatacctgggcgatttgactccgctgcaggagagctgcctcattagacttcgccagtggctccaggagacccacaagggcaaaattccaaaagatgagcatattcttcggttcctccgtgcacgggattttaatattgacaaagccagagagatcatgtgtcagtctttgacgtggagaaagcagcatcaggtagactacattcttgaaacctggacccctcctcaggtccttcaggattactacgcgggaggctggcatcatcacgacaaagatgggcggcccctctacgtgctcaggctggggcagatggacaccaaaggcttggtgagagcgctcggggaggaagccctgctgagatacgttctctccataaatgaagaagggctaaggcgatgcgaagagaatacaaaagtctttggtcggcctatcagctcatggacctgcctggtggacttggaagggctgaacatgcgccacttgtggagacctggtgtgaaagcgctgctgcggatcatcgaggtggtggaggccaactaccctgagacactgggccgccttctcatcctgcgggcgcccagggtatttcctgtgctctggacgctggttagtccgttcattgatgacaacaccagaaggaagttcctcatttatgcaggaaatgactaccagggtcctggaggcctgctggattacatcgacaaagagattattccagatttcctgagtggggagtgcatgtgcgaagtgccagagggtggactggtccccaaatctctgtaccggactgcagaggagctggagaacgaagacctgaagctctggactgagaccatctaccagtctgcaagcgtcttcaaaggagccccacatgagattctcattcagattgtggatgcctcgtcagtcatcacttgggatttcgacgtgtgcaaaggggacattgtgtttaacatctatcactccaagaggtcgccacaaccacccaaaaaggactccctgggagcccacagcatcacctctccgggtgggaacaatgtgcagctcatagacaaagtctggcagctgggccgcgactacagcatggtggagtcgcctctgatctgcaaagaaggagaaagcgtgcagggttcccatgtgaccaggtggccgggcttctacatcctgcagtggaaattccacagcatgcctgcgtgcgccgccagcagccttccccgggtggacgacgtgcttgcgtccctgcaggtctcttcgcacaagtgtaaagtgatgtactacaccgaggtgatcggctcggaggatttcagaggttccatgacgagcctggagtccagccacagcggcttctcccagctgagtgccgccaccacctcctccagccagtcccactccagctccatgatctccaggtagtgccgcgctgcctgcacctagtgtgcagaggggacggccgcccctcctcggacagccagctgcacccgcccacccagcggcgacattgtacagactcctctcacctctagatagcaaatagctctcagatggtaaacgtagtcgtttgatcccaaaactaccttggcaggtagttttaactctgatcctaacttaactcaatagccatagattttgtatacgttgtgcacaaaatccaaccagagcgcaagggctctcttgaaagaaaagtagtttctgtaccaattaaaggattgacgtggtctcagatattgatgcaaaaaatttttccaacgaactccgcattgtccattagtgaatgaattcctgtgacatcctccagagatggcccctcctcacctgggacggaagctgccagctcgcttcccccaagctgcctcatggcccgcacgccgcctcacggcccccatgcttcccgccagtcaagatggtctgtggacttagggccagcccttgaggtccttatcctctgaggattcagaggttgcctgcggagtaccttgtcccagggccagacacacccacaccacccactgtcctgcagtggggccgggggctcaggaggggctctcagggactcctggtgactccaggaaaatgctgccatcgttaaacattactttctctttcctccttttcaaatctttttgatactttttagagcaggatttttctgtatgtgaacttgggtgggggggttcttcccgtttccttccgtgcgtcgcccctctcacctgcagtcagctcccagcccagtgtaggccatctcctctgtgccctctggtggctcattgtcctcagagcccagacagttccagccactaggaggccgtcttggaaccagcaagtcgcatttgccacttgacactgtccatggggttttattagtagctaagcagcagctctcgcatccacttcagggtggcgtgtggcatgtaggagtcctgcttctttgtacatgggaattgtggactcatgcgtgtgtgtgtgtgcatgtgctgtgtgtgtgcatgtgtgcatgacggtgggggtgctggggggacggggtgagtggaaacttagtttgagtaatgaaggaatcttcacagaagcaaatcagaatatgggatttgtttgccttttacattttgtttaattcctgattttaaagcctgctctatctggtacaggcccttattttttcagctttttatgggaaaagcaggttatttgagaatctgtccagaagttgcataggggatggcctccacgataaggacatgcaacacgtgtttctgtgtgcagcagaggccgtgtttttcatgccaaaccccacgcggctgtcaactgtgtgcgtggtaggcatggagatcctggttgtgccgtctcagctccgctctgaaggcactgtgtgggtgctgcgtgactggagagctgtgtggaggccatgtgtgccccgtgcagggatcaggagggcgggggagggaccgagcagccctcttgcccggtcgggtcagccctagtggctgcctgcacactgtagacgtcccagggcctgtgctgtgatcacctgcctttggaccacatttgtgtttgctcttagagatcgagctcctcagtggtacctgaagcctttgcttccggaaagcgcggtagggttcgtaggtagggctagtaggtagggttagtaggtagggctagtaggtagggctagtaggtagggttcgtaggtagggttcgtaggtagggctggtaggtagggttagtaggtagggctagtaggtagggttagtaggtagggttcgtaggtagggttcgtaggtagggttcgtaggtagggctagtaggtagggttagtaggtagggttcgtaggtagggttcgtaggtagggttaggtagggttcgtaggtagggttagtaggtagggctagtaggtagggttcgtaggtagggttcgtaggtagggctagtaggtagggttagtaggtagggctagtaggtagggctagtaggtagggttagtaggtagggctagtaggtagggttcgtaggtagggttagtaggtagggctagtaggtagggttcgtaggtagggttcgtaggtagggctagtaggtagggttagtaggtagggctagtaggtagggctagtaggtagggttcgtaggtagggttcgtaggtagggttcgtaggtagggttcgtaggtagggttagtaggtagggttcgtaggtagggctagtaggtagggctagtaggtagggctagtaggtagggttagtaggtagggctagtaggtagggctagtaggtagggctagtaggtagggctagtaggtagggttcgtaggtagggttcgtaggtagggttcgtaggtagggttagtagcgcgtctgtgctgcttccacctggtgcttcctgttcccaaatcacaagggcctgaaggtggtccctgctttctctttctctttctctgtgtctcagatggcgattttgctgacagctgccaagaaaatgcttcactcaacagtcctcatgtgcccagagatgtttatagaactgtttgaattgcagccatcccctgccccctcccaggctgaagatctgttctttttaagttgattcgggagtggcattcttttatacccaaagactgtagtgcatcttgaagagctcaaagcacatgaccgcacaaatgcttacagggtttcctcccgagtaatccaatctcactccccttgtaagggaattctggggcagctatggtttgagtatgcagtttgcatcgtgtttctacctttagtaccttgccactcttttaaaacgctgctgtcatttcccatttcttagtactaatgattctttgattctccctctattatgtcttaattcactttccttcctaaatttgttatttgcatatcaaattctgtaaatgttttgtaaacatattacctcacttggtaatacaatactgatagtctttaaaagatttttttattgttatcaataataaatgtgaactatttaaagaaaa

SEQ ID NO: 27 - DNA, 1295 bp, Homo sapiens
ttggtcccaggcagcagttagcccgccgcccgcctgtgtgtccccagagccatggagagagccagtctgatccagaaggccaagctggcagagcaggccgaacgctatgaggacatggcagccttcatgaaaggcgccgtggagaagggcgaggagctctcctgcgaagagcgaaacctgctctcagtagcctataagaacgtggtgggcggccagagggctgcctggagggtgctgtccagtattgagcagaaaagcaacgaggagggctcggaggagaaggggcccgaggtgcgtgagtaccgggagaaggtggagactgagctccagggcgtgtgcgacaccgtgctgggcctgctggacagccacctcatcaaggaggccggggacgccgagagccgggtcttctacctgaagatgaagggtgactactaccgctacctggccgaggtggccaccggtgacgacaagaagcgcatcattgactcagcccggtcagcctaccaggaggccatggacatcagcaagaaggagatgccgcccaccaaccccatccgcctgggcctggccctgaacttttccgtcttccactacgagatcgccaacagccccgaggaggccatctctctggccaagaccactttcgacgaggccatggctgatctgcacaccctcagcgaggactcctacaaagacagcaccctcatcatgcagctgctgcgagacaacctgacactgtggacggccgacaacgccggggaagaggggggcgaggctccccaggagccccagagctgagtgttgcccgccaccgccccgccctgccccctccagtcccccaccctgccgagaggactagtatggggtgggaggccccacccttctcccctaggcgctgttcttgctccaaagggctccgtggagagggactggcagagctgaggccacctggggctggggatcccactcttcttgcagctgttgagcgcacctaaccactggtcatgcccccacccctgctctccgcacccgcttcctcccgaccccaggaccaggctacttctcccctcctcttgcctccctcctgcccctgctgcctctgatcgtaggaattgaggagtgtcccgccttgtggctgagaactggacagtggcaggggctggagatgggtgtgtgtgtgtgtgtgtgtgtgtgtgtgtgtgtgcgcgcgcgccagtgcaagaccgagattgagggaaagcatgtctgctgggtgtgaccatgtttcctctcaataaagttcccctgtgacactc

SEQ ID NO: 28 - DNA, 2465 bp, Homo sapiens
gggcgcggagctggcaagcgggtggcggaggcggcgccgacggggactgctgaggcgcgcagagggtcggcggcgcccgggagcctgtcgctggcgcggtccgggcgggaggctcggcggcgggcggcagcatgtcggtggcggggctgaagaagcagttctacaaggcgagccagctggtcagtgagaaggtcggaggggccgaggggaccaagctggatgatgacttcaaagagatggagaagaaggtggatgtcaccagcaaggcggtgacagaagtgctggccaggaccatcgagtacctgcagcccaacccagcctcgcgggctaagctgaccatgctcaacacggtgtccaagatccggggccaggtgaagaaccccggctacccgcagtcggaggggcttctgggcgagtgcatgatccgccacgggaaggagctgggcggcgagtccaactttggtgacgcattgctggatgccggcgagtccatgaagcgcctggcagaggtgaaggactccctggacatcgaggtcaagcagaacttcattgaccccctccagaacctgtgcgagaaagacctgaaggagatccagcaccacctgaagaaactggagggccgccgcctggactttgactacaagaagaagcggcagggcaagatccccgatgaggagctacgccaggcgctggagaagttcgaggagtccaaggaggtggcagaaaccagcatgcacaacctcctggagactgacatcgagcaggtgagtcagctctcggccctggtggatgcacagctggactaccaccggcaggccgtgcagatcctggacgagctggcggagaagctcaagcgcaggatgcgggaagcttcctcacgccctaagcgggagtataagcccaagccccgggagccctttgaccttggagagcctgagcagtccaacgggggcttcccctgcaccacagcccccaagatcgcagcttcatcgtctttccgatcttccgacaagcccatccggacccctagccggagcatgccgcccctggaccagccgagctgcaaggcgctgtacgacttcgagcccgagaacgacggggagctgggcttccatgagggcgacgtcatcacgctgaccaaccagatcgatgagaactggtacgagggcatgctggacggccagtcgggcttcttcccgctcagctacgtggaggtgcttgtgcccctgccgcagtgactcacccgtgtccccgccccgcccctccgtccacactggccggcaccccctgctgggtctcctgcattccacggagcccctgctgccagggcggtgtctgagcctgccggcgccacctgggccccggcccttgaggtactccctgagcaggaccccacacttgggtgggggggcttatctgggtgggtggggatgcctgtttacactagcgctgactcccaacggtgacggctcccttccccactccatggcgccagcctcctcccccgctccccaacttctcgcccagctggccgaggcggggcaacactaaggtgctcttagaaacactaatgttcctctggggcagcccccacctccgtcctgacccgacgggggcccggcccactgcctaccctcgagtcccgcagccttaacaggatgggatcgagggtccccatggggtggctcagagataggaccctggttttaaatccctcccagcctggtgctggtgatgggccctggccctactccagggccaatgcacccccgcctcacacacgcactccttctcctcaaggccagggcagagggcctcaccgcctcccgggcctgctgtcagcttgcagcccggggacagaggccagctgggatctgcctgaggacagagaacatggtctcctgcagggccctgcctcccaagccccgccctcagaaagccaagtaccttttcagctttttaactgcccccatcccaacccagggaggcctgtgtcactctggcacaagctgccaccaccagccacccacacccaccccagcacacctcacacgggaccacagccgcgctgccgagggccaagcacaaaggttccagtgagcgcatgtcccagcccctggtggccaggctccccttgctgagccgctgccacttcaccctgtgggaagtggccccagccatctcctctagaccaaggcaggcagccccgacatctgcttcctctatcgcccaatgcaaaatcgatgaaatggggagttctctgggccaggccacattcacattcccctccccctgtggtccagtgaagcctccggaccccaggctctgctctgccctgccctgcacccccctcgtcagaagtacatgaggggcgcagagatgagcacacagctttgggcacggtccagggcaaactgaaatgtacgcctgaattttgtaaacagaagtattaaatgtctctttct

SEQ ID NO: 29 - DNA, 4954 bp, Homo sapiens
agcgtctggccgatttggggacgcgggcagtcgcttccggccccggctcccgcacattcttgaggattgggccggggatgggaggaatggggacgcctggggacttgcacgccgcgtgcccctccaccacccgccgggacgccctctgcctcggtcccgagttcgagttcgacctccgccactcagctgggtgtcctggggaccttggtttcttccctttagatccggacactgaagcaggcggtagcgggtgtcttcctacctggctaccccttcggcgcctagcgcgaggcagggtgggcgaggcgagggcggcgccctgcgagggagggcggtcgcagaacctgcgggccttcagcgccccctggcgaggcttcccatttgcccccttgtctctctccctcctcctgactggctagaaccaagtatgggggtgatgcttattgcaactgcagctatgtacaggagaggccaagtcactgttcccaaccccacccactggcaaatgaaaaaaccaagacacagagagtttaagggatatgctcttgatcacccagccaggattggactagggctggaaccaactaagggctctggcctgagtttcagggggtcttctcataattcctcaggaatgtggagcctggagggctcttcccccaagactctccctgctctcttcagactaggacaagctggctcatggctgagttgggccagcccacactccctgctgaaaactatctccatcccatccccacccttgccacctggccttcccgctaagcagaaaggaatgacgggggggcgctaaaaagggagatgatagagggttctttggccctacccctgaatgatttggggggtggggacagaggaaatcaccccgcctttactggctcccgtctggttatcagacccacactggaggcttatctctgccactatcttccaggggaaccctgggccagtcctctctcccttgagccacggaggatctgtatgtagcaggtggctctacatggtggaggtgtgggggaggcaacaggattggctgactcactccagagaaggtgttctttcctgaacctggttagaccagtcacccccaatttcccgggaactgaggggttgagaaccggtagaagcagctgtcacccagggatgccctctataaggccctggggtggcccctagtgccagccaccttatatgtctgggggattggtcctcccactctgcaccctggcttcttccatggtggctaggtccaggccagtgcagtggggacaatagccctcagccaggcaggactcctgagcacctgtcctcagtttccccatctgtggatgaagcagtcaacccccagctgggctgtggtgtttggtgactagaccagggagcctcccttgctcagagggtggacttcatctgtcacctttccctctagggaccctgttagtgacccacagggtggcctccctcctcctcctacaatagctccctgacttttggggatctgggctctgagaggcaggaatcgagttgtagaaaggagtgcctggcttggcacctggcacaagtgggcagtttctggctgtccactcacagttgtgtgctctgtgaaccacaatgcaaagtggactacccaagatccctgaaacagtgggctgggtctacccccgggaccctgcgtgggcaggcaggcacgtgaagagcttgggacacagggagtggacacaggccacacattgtgccctaggcagagccgtgggcagctggtgccagccctccgcccctggcagccaaaatgacctgcctctcgcacccactgcagctggaggtcacagcagatctggcagagcggcggcgcatccgctcagccatccgggaactgcagcggcaggagctggagcgcgaggaggaggccctggcatccaagcgtttccgtgccgagcggcaggacaacaaggagaactggctgcactctcagcagcgggaagctgagcagcgggctgccctggcacggctggcagggcagctggagtccatgaacgatgtggaggaattgactgcactgttgcgaagcgctggtgagtatgaggagcgcaagctgatccgagctgccatccgccgtgtacgggctcaggagattgaggctgccaccttggctgggaggttgtacagcgggcgtcccaacagtggctcaagagaggacagcaaggggctagcggcacacaggctggaacagtgtgaggtgccagagcgagaggaacaggaacagcaggcagaggtttcaaagccaacccccacccctgaaggcaccagccaggatgtgaccacagtgacactcctgctgcgagccccacctgggagcacatccagctcacctgcctcacccagcagttcacccacccctgcctctcctgagcctccattggagcctgccgaggcccagtgccttacagctgaggttccaggcagcccagagccaccccccagcccacccaagaccaccagccctgagcctcaggagtctccaacgctccccagcactgagggccaggtggtcaacaagcttctgtctggccccaaagagacccctgctgcccagagccccaccagaggcccctctgacaccaagagagcagacgtggctggaccccgaccctgccaacgctccctgtcggtgctcagcccccgccaaccagcccagaaccgagagtccaccccccttgccagcggaccttcctcattccagcgggctggctctgtgcgggatcgtgtccacaagttcacatctgattctcctatggctgctaggctccaggatggcacaccccaggctgccctaagtcccctgacccccgcaaggctcctgggcccctccctcaccagcaccacccctgcctcctcctccagcggctcctcctctcggggccccagtgatacctcctcccggttcagcaaggagcaacgaggagtagcccagcccctggcccagcttcgaagctgcccccaggaggagggccccagggggcggggcttggctgctaggccccttgaaaacagagcaggggggcctgtggcacgttcagaggagcctggtgccccgctgcccgtggccgtcggcactgccgagccagggggcagtatgaagaccacattcaccatcgagatcaaggacggccgtggccaggcctccacaggccgggtgctgctgcccacaggcaaccagagggcagaactgacactggggctgcgggcgcccccgaccctactcagcaccagtagtgggggcaagagcaccatcacccgtgtcaacagccctgggaccctggctcggctgggcagtgtcactcatgtcaccagcttcagccatgccccccccagtagccgaggaggctgcagcatcaaggctgccgaggatgccgggacccccgtggcccacccacctgccttcagcacccgccgccgctcctccaccggcaccacccgcagcactagtctcatggaagcagagccagcagagcctctcgctgcagcagtggaagcggccaatggggctgagcagacccgagtgaacaaagcaccagaagggcggagccctctgagcgctgaggagctgatgactattgaggatgaaggagtcttggacaagatgctggatcagagcacggactttgaagagcggaagctcatccgggctgcacttcgtgagctccgacaaaggaagagagaccagcgggacaaggagcgggaacggcggctgcaggaggcacggggccggccaggggaggggcgcggcaacacagccactgagaccaccacgaggcacagccagcgggcagctgatggctctgctgtcagcactgttaccaagactgagcggctcgtccactccaatgatggcacacggacggcccgcaccaccacagtggagtcgagtttcgtgaggcgctcggagaatggcagtggcagcaccatgatgcaaaccaagaccttctcctcttcctcctcatccaagaagatgggcagcatcttcgaccgcgaggaccaggccagcccacgggccggcagcctggcggcgctcgagaaacggcaggccgagaagaagaaagagctgatgaaggcgcagagtctgcccaagacctcagcctcccaggcgcgcaaggccatgattgagaagctggagaaggagggcgcggccggcagccctggcggaccccgcgcagccgtgcagcgatccaccagcttcggggtccccaacgccaacagcatcaagcagatgctgctggactggtgtcgagccaagactcgcggctacgagcacgtcgacatccagaacttctcctccagctggagtgatgggatggccttctgtgccctggtgcacaacttcttccctgaggccttcgactatgggcagcttagccctcagaaccgacgccagaacttcgaggtggccttctcatctgcggagacccatgcggactgcccgcagctcctggatacagaggacatggtgcggcttcgagagcctgactggaagtgcgtgtacacgtacatccaggaattctaccgctgtctggtccagaaggggctggtaaaaaccaaaaagtcctaacccctgctcggggccccacggatgctggtggactgtgtgcccctggtggaggtggacgacatgatgatcatgggcaagaagcctgaccccaagtgtgtcttcacctatgtgcagtcgctctacaaccacctgcgacgccacgaactgcgcctgcgcggcaagaatgtctagcctgcccgcccgcatggccagccagtggcaagctgccgcccccactctccgggcaccgtctcctgcctgtgcgtccgcccaccgctgccctgtctgttgcgacaccctcccccccacatacacacgcagcgttttgataaattattggttttcaac

SEQ ID NO: 30 - DNA, 3268 bp, Homo sapiens
gctcttacaggaggagaatgaagagcttcgccggcgcctggcctccgccaccagacgcactgaggccctggaacgtgagctggaaattgggcaggactgcctggagctggagctgggccagagccgcgaggagctggacaaatttaaggataagttccgcaggctgcagaacagctacacggcttcccagcggaccaaccaggagttggaggacaagctgcacacactgatcaagaaggctgagatggataggaagacgctggactgggagattgtggagctgaccaacaagctgctggatgccaagaacaccatcaacaagctggaagagctcaatgagcggtaccggctggactgcaacctggctgtacagctcctcaagtgcaacaagtcccacttccgaaaccacaagtttgccgatgtgagtagaactcaccccctccctgcccacatagaccattccggccactgtaggactcctctaactccagtttctgcacctctctctgtcctcctcttcccactttgccctcctcttgcctccatgtcacctctcaagccagtcaactctgccactggttggtgtcccgtgtactgtccagggcccatcactagttctggggggccagccctgttggtttctgtaacagagacagagagagaagatcctgggcaggaaggagagggtagtcagagctatctgcccaaagagtactaagagaggattaggcccatctgatcatgttaccccaaggggtaaactctagaccccacagcttcaggcccaaggtttatgtggcctgcagaagtagaagaagtagaggtatttctttttttttttttttttgagacggagtcttgctctgtcacctaggctggagtgcagtggcacaatctcggctcactgcaacctccgcctcccggcttcaagcaattctcctgcttcagcctcccaagtagctggaattataggcgcccaccaccacgcctggctaatttttttgtctttttagtagagatggggtttcatcgtgttagccaggatggtctcgatctcctgacctcgtgatccacccgcctcggcctcccaaagtgctgggattacaggcatgagccactgtgcccggcccagaagtagaggtatttctaaggctactggtctatgcagattctccaaacttaagtatggtttgggcagaagctgggagatagaagtttgagaacatgctggctgcagcagcagatccgggtttaaatcttggccaagttaaccaaagctttgagttgtcttcccctctccaggcctatgtgtctgtgaagtgagggtatacacactggcatgctgtaagaacaggagatagcagagtgctgagtacacagaggtacttaaaggtgggagccattactttcgccatgagtcaagttatctttggctgcgatcattgatgtctctctttcctgctcttttacctcagctgccctgtgagctacaggacatggttcggaaacatttgcacagtggtcaagaggccgccagcccaggtcctgctcccagcctagccccaggggctgtggtgcctacctcagtcattgcccgagtgttagagaagccggagtctctactgctcaattcagcccagtcaggcagcgccgggcgccccttggctgaggatgtctttgtgcatgtggacatgagtgagggtgtcccaggtgatccagccagtcccccggcccctggcagccccaccccacaacccaatggggagtgccactctctgggtactgccaggggctccccggaggaagagctgcccctgccagcctttgagaagctgaacccctacccaaccccgtctccaccacacccactgtatcctggccgcagggtaatagagttctctgaggataaggttcggatcccccgcaacagccccctgcccaactgcacttacgctacccgccaggccatttccctgagcctggtagaggaggggagtgagcgggcccgccccagcccagtgcccagcacccctgcctcagcccaggcctcaccccaccaccagcccagcccagcacccctaacactcagtgccccagctagctctgccagctctgaagaggacctgctggtcagctggcagcgggcatttgtggaccgtactccaccacctgctgctgtggcccagcgcacagcctttggacgcgatgccctccctgagctgcagcgccattttgcccatagccccgctgacagagatgaggtggtccaggcaccttctgcccgacccgaagagagtgagcttttgctacccacagaacctgactctggctttcccagggaggaagaagagctgaacctgcctatcagtcctgaggaagagcgccagagcctgctgcccattaacaggggcacagaggaggggccaggcacttcccacaccgagggcagggcctggccactccccagctccagtcgcccccagcgcagccccaagaggatgggggttcaccacctgcaccgcaaggacagcctgacccaggcccaggagcagggcaacctgctcaactagggcccctgctggccttcctgccattgctgcaccaggactgcaaggagtccccacaccttggcagctcagggtccccagtccaagcccttgacctctcctctatccagacccgcacagctgtttcctgtgtggatggggtcaggttgtgggccatgccaggcctgtcagctgcgttgactgactgcagcagcttgcctcatggttttccctttttcttagaatatttattcttcagaggtaacatgcagttgggtctcaagacctttcctccaatcagcccaacccagcccagactgggcttttctggggagctgaggagtttatcagtattcatcttccatcctttcatagtcacaagttttgttattttgtttttttttgggggtgatggtgtaattgttaacctcatttccgtttcctacctgtttgcttccccccccagtcctccgcatgagctgttgccctccaggggcctggcacagctggccttggggacgagggagaggactgattcagggccccctcagctgtctcctccctccctctggaaaggagggtggggctcaggggcctcaagctgggctctgtgtgaggcctggcccccactcccaaccttggctctagactgttactcttaagctttgagaaattttcacattgatgactattttaaaatcaaataaaactattttactggt

SEQ ID NO: 31 - DNA, 2478 bp, Homo sapiens
gtatttccggagtcccttctgagacagaaggttgtgttggggaactgaaggagtttctgtgggcggacagggaaccctgcgtttctactgtgtgattctgccaccttcctggcccgacgccatgggagtgacttgtgtgtcccagatgcctgtggccgagggcaagagtgttcagcaaaccgtagagctccttacccggaaattggagatgcttggggcagagaagcaaggaacattttgtgtggactgtgagacttaccatacggccgcctctacccttggcagccaaggtcagaccgggaagctgatgtatgtgatgcacaactcagagtacccattgagctgtttcgccctctttgagaatggcccttgccttattgctgacaccaactttgatgtgcttatggtgaagctcaagggctttttccagagtgctaaggccagcaagattgagacccggggcaccaggtaccagtactgtgacttcctggtgaaggtgggcacggtcacaatggggcccagtgcccggggcatctctgtggaggtggagtatggcccctgtgtggtagctagtgactgctggagtctgctgctcgagttcctacagagttttctaggcagccacacaccaggggctcccgcagtgtttgggaacagacatgatgcggtctacggcccagcagataccatggtccagtacatggaactcttcaacaagatccgcaagcagcagcaggtgccggtggctgggattcgttagtgatgagcagctgccagctgagctctgtcaccaggggtactccacaggaggagcaggtgctgactttcaggtccctggaccccagaaacccagggtagacatggactctactctccttctctggttctcagctgtggcttttgttctggggctgagtcccctccccaaccccctgactctcacacatagccccccatcagctgttttactccgtgccttactggatttggcctgtcctcaagaatggtaattatgaagagtggagaagtttggaccttgcctcctttaggggaaaggtaggacaggaatgtccctgcctggtactggtgggggaaatagtccgtatccccaactattaaggatttgtcccaggccaatggtgaacatgctgcattttatgtttggattgtgctgtaataagagcctcttccttccctcagaggatgtggctgggcttctatcctagagatggagtagaaggcacaactggtttgatagttactattttctgacctgtttgctgaagtgatttgcgaattgactttcctagggtgttgcctgagtcctttgaaatctccttctgacatctttcccttctgttgtgaaatatgttaagccacaggccaaactgctataagatcgaagtttgtttttttctcacctaataatagagaggtaatcagatggtctagggcagatttaactctacaaggttatcaggaactttgtttccttctgtcttattcagccattcccagtatgttttcttacccataagatcaaagcagactcatcagctccatatctgcattccactggggaaagagagagagaaaagagcagattttaaaaaaaagatatgactgagcattgctcagatcactgtggccacactttgctgaaagagatgctgggacatagaacctcttatctgggcagtcatgtgctgagttaaaactcagggattctgtgactacaagatgaaagacaatttggttgctgagatgcagttaatggcttctgttacatggagctcaatggacgtgcccaggaatgcttttggctgttattttgcagttaatacctcctgtaactaaagcatttgtttatgagttgacttgagagaagggctgatctcagagccgctttgagctaagttggattagtcacactaggaagttaattccacacctttcgtctaagtctcagtattgaggcctctccagttctcatgcaccctgatcttagggttagaatacttgaccctgatacctgcaccatgcttcatggttcctgagctctttctcctgtttcatttgagcctccaaactacatatttggtcatattgcctgcctaccccatgcctgctgcagaaatattcatccaggttaaccttgatatacacagagatggtcttggagaattgtgaatgtatgtactgtattgtcatcaaggatactgtcccttatttgaaggcatctaaagagaaactgttttcagatccaagtgctcagatctaaagcctctgcaacaagtcaggtggtggtcatgtttcccttctagttttggctgacaggaagctcagttcagtaccataactacagaacctgtcatctgtattttttgttctcaccccgtttttgttattttgtttctggttttttatattgaggtatgttttagatatagtttacaaaaataaaacgcacagatctta

SEQ ID NO: 32 - DNA, 3250 bp, Homo sapiens
gcgtgcacgctgacgccgcgcagtctcgtcccctgccgccgccgtcgccgctgctgtcgccgccgccgccgccattggagtcgacgcctcctcagtgcgtccgcgtcccgggctcaccgccgctgccgcctcgccaggggcccgcgcgcccagcagccgccgccgccgcccggccggcgcccggggaattggcggcggggcccggggccgcgcgagctagggtgacaggcccggcctctaggggaggcccgagccggcgggcgccccggccccgcgtctagttgttcatgaagcatgtcggccaccagcgtggacacccagagaacaaaaggacaagataataaagtacaaaatggttcgttacatcagaaggatacagttcatgacaatgactttgagccctaccttactggacagtcaaatcagagtaacagttacccctcaatgagcgacccctacctgtccagctattacccgccgtccattggatttccttactccctcaatgaggctccgtggtctactgcaggggaccctccgattccatacctcaccacctacggacagctcagtaacggagaccatcattttatgcacgatgctgtttttgggcagcctgggggcctggggaacaacatctatcagcacaggttcaattttttccctgaaaaccctgcgttctcagcatgggggacaagtgggtctcaaggtcagcagacccagagctccgcgtatgggagcagctacacctaccccccgagctccctgggtggcacggtggttgatgggcagccaggctttcacagcgacaccctcagcaaggcccccgggatgaacagcctggagcagggcatggttggcctgaagattggggacgtcagctcctccgccgtcaagacggtgggctctgtcgtcagcagcgtggcactgactggtgtcctttctggcaacggtgggacaaatgtgaacatgccagtttcaaagccgacctcgtgggctgccattgccagcaagcctgcaaaaccacagcctaaaatgaaaacaaagagcgggcctgtcatggggggtgggctgccccctccacccataaagcataacatggacattggcacctgggataacaaggggcctgtgccgaaggccccagtcccccagcaggcaccctctccacaggctgccccacagccccagcaggtggctcagcctctcccagcacagcccccagctttggctcaaccgcagtatcagagccctcagcagccaccccagacccgctgggttgccccacgcaacagaaacgcggcgtttgggcagagcggaggggctggcagcgatagcaactctcctggaaacgtccagcctaattctgcccccagcgtcgaatcccaccccgtccttgaaaaactgaaggctgctcacagctacaacccgaaagagtttgagtggaatctgaaaagcgggcgtgtgttcatcatcaagagctactctgaggacgacatccaccgctccattaagtactccatctggtgtagcacagagcacggcaacaagcgcctggacagcgccttccgctgcatgagcagcaaggggcccgtctacctgctcttcagcgtcaatgggagtgggcatttttgtggggtggccgagatgaagtcccccgtggactacggcaccagtgccggggtctggtctcaggacaagtggaaggggaagtttgatgtccagtggatttttgttaaggatgtacccaataaccagctccggcacatcaggctggagaataacgacaacaaaccggtcacaaactcccgggacacccaggaggtgcccttagaaaaagccaagcaagtgctgaaaattatcagttcctacaagcacacaacctccatcttcgacgactttgctcactacgagaagcgccaggaggaggaggaggtggtgcgcaaggaacggcagagtcgaaacaaacaatgagggcgaaccagtttcttacatgttctaacgtttgactttgaaaacagtttaaaacacgtgtgcttggtcagctccagtgtgtcgtcccgtgcgggggttgagtgttgcatctttgcctttcttgtcgttgatttttgcccagatggatctgcatttatttgtactttttctatgtattataatcctgtagaagtcactaataaaggagtattttttttgtcagcttatcaatcagactgatctaatgtgaaatgtaagtatccttaaaaacaaagcatctattttggcagaaattgtgttcttaaattcagtcatttgatattctgtgagacttcatatttctcatccctttattgctttttagcaaacataagaaaccatgagtcattttgtcatttagagtattctgataaaatctcttgaaaatactgaaatcaaaaggttaatgattttttgttcattctgatttgtcattttattatctgttatcggtctaaagtgctaatttacccatttgatttttctgctagacagataacttttaatttttcaaatttggcagacactttttttttttttttgaaaatctttccttccagatctgttgcccactgaacagccacccgtccctcactgtcctggtgtccgattgggctggatggtgttggggcatgatgtgtggaggaactggaaggtgctttaggtctggttcagggtcgggcattctttgttgtttgcacatctttttaaattttacaccttttcttaagaattctaatgccgtcttaagtttttataccaataatgctgagctttaagtgtaggatctggtagtacagacagtgtgatggatgatgctgctggttgtaaatttcatcgtgtgtgtctaattttttttcctgttgaatgggtaaaaacaaaacaaaactttttttagaagatgaatttgctgtcatgttttgtggaatgagggaccgttgagctcactaccacctggagtttgagttgaagcatgaaaatggtgcccatgcctgacgctccagcgcctggatctgcacgtgcccttgtagaggatccttaccgtcctagagagcagacgctttctgaaaactacttgctccaaaagaccctctgagttaacgtttcagctgtatcattagacttgtatttagagcgtgtcacttcctctgaactgttactgcctgaatggagtcctggacgacattgggtttttcctctaggagaatacaagccttaataaacaatactatttagc

SEQ ID NO: 33 - DNA, 1808 bp, Homo sapiens
gtccctgagtaggtgaggaggtgggtaggagcttgcttatagaaaagtggaatcgagtagtccttgctggtggagccgctgccgccagggaactcagggccggctcctgttccttcaagagtgctggaggccaaacttgaaatacaagtttaatgttcctcgtcgggcaaaagataaggatccgatctcccccggcccggtgtgcagcaggagcgaccaaccccgacccgggttaaaactcccagggactcttcgctgctgccacctcttgttctctcccccgttcccactcggggtctccctcagggccgggaggcacagcggtccctgcttgctgaagggctggatgtacgcatccgcaggttcccgcggacttgggggcgcccgctgagccccggcgcccgcagaagacttgtgtttgcctcctgcagcctcaacccggagggcagcgagggcctaccaccatgatcactggtgtgttcagcatgcgcttgtggaccccagtgggcgtcctgacctcgctggcgtactgcctgcaccagcggcgggtggccctggccgagctgcaggaggccgatggccagtgtccggtcgaccgcagcctgctgaagttgaaaatggtgcaggtcgtgtttcgacacggggctcggagtcctctcaagccgctcccgctggaggagcaggtagagtggaacccccagctattagaggtcccaccccaaactcagtttgattacacagtcaccaatctagctggtggtccgaaaccatattctccttacgactctcaataccatgagaccaccctgaaggggggcatgtttgctgggcagctgaccaaggtgggcatgcagcaaatgtttgccttgggagagagactgaggaagaactatgtggaagacattccctttctttcaccaaccttcaacccacaggaggtctttattcgttccactaacatttttcggaatctggagtccacccgttgtttgctggctgggcttttccagtgtcagaaagaaggacccatcatcatccacactgatgaagcagattcagaagtcttgtatcccaactaccaaagctgctggagcctgaggcagagaaccagaggccggaggcagactgcctctttacagccaggaatctcagaggatttgaaaaaggtgaaggacaggatgggcattgacagtagtgataaagtggacttcttcatcctcctggacaacgtggctgccgagcaggcacacaacctcccaagctgccccatgctgaagagatttgcaaggatgatcgaacagagagctgtggacacatccttgtacatactgcccaaggaagacagggaaagtcttcagatggcagtaggcccattcctccacatcctagagagcaacctgctgaaagccgtggactctgccactgcccccgacaagatcagaaagctgtatctctatgcggctcatgatgtgaccttcataccgctcttaatgaccctggggatttttgaccacaaatggccaccgtttgctgttgacctgaccatggaactttaccagcacctggaatctaaggagtggtttgtgcagctctattaccacgggaaggagcaggtgccgagaggttgccctgatgggctctgcccgctggacatgttcttgaatgccatgtcagtttataccttaagcccagaaaaataccacgcactctgctctcaaactcaggtgatggaagttggaaatgaagagtaactgatttataaaagcaggatgtgttgattttaaaataaagtgcctttatacaatgcc

SEQ ID NO: 34 - DNA, 3380 bp, Homo sapiens
gccagaggatggaatgccacaggccccacttcgtctcccagcccttcatctttcttccatgtccaaaggcggctccccagaggccaagggctcagctcttgtgttctctgagactgtggcacagctcaccctggcttccttagtaggaagcttttaagaactgctctgtagaaagaacaaaccctaatctagctccagcaaagagccaggatcatgctgaacttcctgtgagccttcgtgggggatcgaggctggagaaagtgctgcttcattctgaggtctgaatttcctgctgctgttcacaaagatgctttttatctttaactttttgttttccccacttccgaccccggcgttgatctgcatcctgacatttggagctgccatcttcttgtggctgatcaccagacctcaacccgtcttacctcttcttgacctgaacaatcagtctgtgggaattgagggaggagcacggaagggggtttcccagaagaacaatgacctaacaagttgctgcttctcagatgccaagactatgtatgaggttttccaaagaggactcgctgtgtctgacaatgggccctgcttgggatatagaaaaccaaaccagccctacagatggctatcttacaaacaggtgtctgatagagcagagtacctgggttcctgtctcttgcataaaggttataaatcatcaccagaccagtttgtcggcatctttgctcagaataggccagagtggatcatctccgaattggcttgttacacgtactctatggtagctgtacctctgtatgacaccttgggaccagaagccatcgtacatattgtcaacaaggctgatatcgccatggtgatctgtgacacaccccaaaaggcattggtgctgatagggaatgtagagaaaggcttcaccccgagcctgaaggtgatcatccttatggacccctttgatgatgacctgaagcaaagaggggagaagagtggaattgagatcttatccctatatgatgctgagaacctaggcaaagagcacttcagaaaacctgtgcctcctagcccagaagacctgagcgtcatctgcttcaccagtgggaccacaggtgaccccaaaggagccatgataacccatcaaaatattgtttcaaatgctgctgcctttctcaaatgtgtggagcatgcttatgagcccactcctgatgatgtggccatatcctacctccctctggctcatatgtttgagaggattgtacaggctgttgtgtacagctgtggagccagagttggattcttccaaggggatattcggttgctggctgacgacatgaagactttgaagcccacattgtttcccgcggtgcctcgactccttaacaggatctacgataaggtacaaaatgaggccaagacacccttgaagaagttcttgttgaagctggctgtttccagtaaattcaaagagcttcaaaagggtatcatcaggcatgatagtttctgggacaagctcatctttgcaaagatccaggacagcctgggcggaagggttcgtgtaattgtcactggagctgcccccatgtccacttcagtcatgacattcttccgggcagcaatgggatgtcaggtgtatgaagcttatggtcaaacagaatgcacaggtggctgtacatttacattacctggggactggacatcaggtcacgttggggtgcccctggcttgcaattacgtgaagctggaagatgtggctgacatgaactactttacagtgaataatgaaggagaggtctgcatcaagggtacaaacgtgttcaaaggatacctgaaggaccctgagaagacacaggaagccctggacagtgatggctggcttcacacaggagacattggtcgctggctcccgaatggaactctgaagatcatcgaccgtaaaaagaacattttcaagctggcccaaggagaatacattgcaccagagaagatagaaaatatctacaacaggagtcaaccagtgttacaaatttttgtacacggggagagcttacggtcatccttagtaggagtggtggttcctgacacagatgtacttccctcatttgcagccaagcttggggtgaagggctcctttgaggaactgtgccaaaaccaagttgtaagggaagccattttagaagacttgcagaaaattgggaaagaaagtggccttaaaacttttgaacaggtcaaagccatttttcttcatccagagccattttccattgaaaatgggctcttgacaccaacattgaaagcaaagcgaggagagctttccaaatactttcggacccaaattgacagcctgtatgagcacatccaggattaggataaggtacttaagtacctgccggcccactgtgcactgcttgtgagaaaatggattaaaaactattcttacatttgttttgcctttcctcctatttttttttaacctgttaaactctaaagccatagcttttgttttatattgagacatataatgtgtaaacttagttcccaaataaatcaatcctgtctttcccatcttcgatgttgctaatattaaggcttcagggctacttttatcaacatgcctgtcttcaagatcccagtttatgttctgtgtccttcctcatgatttccaaccttaatactattagtaaccacaagttcaagggtcaaagggaccctctgtgccttcttctttgttttgtgataaacataacttgccaacagtctctatgcttatttacatcttctactgttcaaactaagagatttttaaattctgaaaaactgcttacaattcatgttttctagccactccacaaaccactaaaattttagttttagcctatcactcatgtcaatcatatctatgagacaaatgtctccgatgctcttctgcgtaaattaaattgtgtactgaagggaaaagtttgatcataccaaacatttcctaaactctctagttagatatctgacttgggagtattaaaaattgggtctatgacatattgtccaaaaggaatgctgttcttaaagcattatttacagtaggaactggggagtaaatctgttccctacagtttgctgctgagctggaagctgtgggggaaggagttgacaggtgggcccagtgaacttttccagtaaatgaagcaagcactgaataaaaacctcctgaactgggaacaaagatctacaggcaagcaagatgcccacacaacaggcttattttctgtgaaggaaccaactgatctcccccacccttggattagagttcctgctctaccttacccacagataacacatgttgtttctacttgtaaatgtaaagtctttaaaataaactattacagatactt

SEQ ID NO: 35 - DNA, 3788 bp, Homo sapiens
tctgccccttccccccgcccccgcccgcctcggctcccgcagcgctagtgtgtccgcctagttcagtgtgcgtggagattaggtccaagcgcccgcccagaggcaggcagtccgcgagcccagccgccgctgtcgccgccagtagcagccttcgccagcagcgccgcggcggaaccgggcgcaggggagcgagcccggccccgccagcccagcccagcccagccctactccctccccacgccagggcagcagccgttgctcagagagaaggtggaggaagaaatccagaccctagcacgcgcgcaccatcatggaccattatgattctcagcaaaccaacgattacatgcagccagaagaggactgggaccgggacctgctcctggacccggcctgggagaagcagcagagaaagacattcacggcatggtgtaactcccacctccggaaggcggggacacagatcgagaacatcgaagaggacttccgggatggcctgaagctcatgctgctgctggaggtcatctcaggtgaacgcttggccaagccagagcgaggcaagatgagagtgcacaagatctccaacgtcaacaaggccctggatttcatagccagcaaaggcgtcaaactggtgtccatcggagccgaagaaatcgtggatgggaatgtgaagatgaccctgggcatgatctggaccatcatcctgcgctttgccatccaggacatctccgtggaagagacttcagccaaggaagggctgctcctgtggtgtcagagaaagacagccccttacaaaaatgtcaacatccagaacttccacataagctggaaggatggcctcggcttctgtgctttgatccaccgacaccggcccgagctgattgactacgggaagctgcggaaggatgatccactcacaaatctgaatacggcttttgacgtggcagagaagtacctggacatccccaagatgctggatgccgaagacatcgttggaactgcccgaccggatgagaaagccatcatgacttacgtgtctagcttctaccacgccttctctggagcccagaaggcggagacagcagccaatcgcatctgcaaggtgttggccgtcaaccaggagaacgagcagcttatggaagactacgagaagctggccagtgatctgttggagtggatccgccgcacaatcccgtggctggagaaccgggtgcccgagaacaccatgcatgccatgcaacagaagctggaggacttccgggactaccggcgcctgcacaagccgcccaaggtgcaggagaagtgccagctggagatcaacttcaacacgctgcagaccaagctgcggctcagcaaccggcctgccttcatgccctctgagggcaggatggtctcggacatcaacaatgcctggggctgcctggagcaggtggagaagggctatgaggagtggttgctgaatgagatccggaggctggagcgactggaccacctggcagagaagttccggcagaaggcctccatccacgaggcctggactgacggcaaagaggccatgctgcgacagaaggactatgagaccgccaccctctcggagatcaaggccctgctcaagaagcatgaggccttcgagagtgacctggctgcccaccaggaccgtgtggagcagattgccgccatcgcacaggagctcaatgagctggactattatgactcacccagtgtcaacgcccgttgccaaaagatctgtgaccagtgggacaatctgggggccctaactcagaagcgaagggaagctctggagcggaccgagaaactgctggagaccattgaccagctgtacttggagtatgccaagcgggctgcacccttcaacaactggatggagggggccatggaggacctgcaggacaccttcattgtgcacaccattgaggagatccagggactgaccacagcccatgagcagttcaaggccaccctccctgatgccgacaaggagcgcctggccatcctgggcatccacaatgaggtgtccaagattgtccagacctaccacgtcaatatggcgggcaccaacccctacacaaccatcacgcctcaggagatcaatggcaaatgggaccacgtgcggcagctggtgcctcggagggaccaagctctgacggaggagcatgcccgacagcagcacaatgagaggctacgcaagcagtttggagcccaggccaatgtcatcgggccctggatccagaccaagatggaggagatcgggaggatctccattgagatgcatgggaccctggaggaccagctcagccacctgcggcagtatgagaagagcatcgtcaactacaagccaaagattgatcagctggagggcgaccaccagctcatccaggaggcgctcatcttcgacaacaagcacaccaactacaccatggagcacatccgtgtgggctgggagcagctgctcaccaccatcgccaggaccatcaatgaggtagagaaccagatcctgacccgggatgccaagggcatcagccaggagcagatgaatgagttccgggcctccttcaaccactttgaccgggatcactccggcacactgggtcccgaggagttcaaagcctgcctcatcagcttgggttatgatattggcaacgacccccagaagaagacaggcatgatggacacggatgatttccgcgcctgcctgatctccatgggttacaacatgggagaagcagaatttgcccgcatcatgagcattgtggaccccaaccgcctgggggtagtgacattccaggccttcattgacttcatgtcccgcgagacagccgacacagatacagcagaccaagtcatggcttccttcaagatcctggctggggacaagaactacattaccatggacgagctgcgccgcgagctgccacccgaccaggctgagtactgcatcgcgcggatggccccctacaccggccccgactccgtgccaggtgctctggactacatgtccttctccacggcgctgtacggcgagagtgacctctaatccaccccgcccggccgccctcgtcttgtgcgccgtgccctgccttgcacctccgccgtcgcccatctcctgcctgggttcggtttcagctcccagcctccacccgggtgagctggggcccacgtggcatcgatcctccctgcccgcgaagtgacagtttacaaaattattttctgcaaaaaagaaaaaaaagttacgttaaaaaccaaaaaactacatattttattatagaaaaagtattttttctccaccagacaaatggaaaaaaagaggaaagattaactatttgcaccgaaatgtcttgttttgttgcgacataggaaaataaccaagcacaaagttatattccatcctttttactgatttttttttcttctatctgttccatctgctgtattcatttctccaatctcatgtccattttggtgtgggagtcggggtagggggtactcttgtcaaaaggcacattggtgcatgtgtgtttgctagctcacttgtccatgaaaatattttatgatattaaagaaaatcttttgaaatggctgttttttaaggaagagaatttatgtggcttctcatttttaaatcccctcagaggtgtgactagtctctttatcagcacacacttaaaaaatttttaatattgtctattaaaaataggacaaacttggagagtatggacaactttgatattgcttggcacagatggtattaaaaaaaccacactcctatg

SEQ ID NO: 36 - DNA, 1743 bp, Homo sapiens
tggagcagcggggcctggcacacagtaggcgttctataaatgtgtcacaagaatggcttccctcaggaaggcggcattaccgctgcctttctgcagaaaaggaaactaaggctcagcaagaaccaccgcccagccagagccaaggtcacagagcacgtccgtggcacgcgtccaggtcgtgccacagcagggccggcggcttcgacgcgggcagccgggtcccttttctttgacagatggggaaaccgaggcccggccggctgccggggctcctcgcacctaccccagcaactcaaattcaccacctcggactcctgcgaccgcatcaaagacgaatttcagctactgcaagctcagtaccacagcctcaagctcgaatgtgacaagttggccagtgagaagtcagagatgcagcgtcactatgtgatgtactacgagatgtcctacggcttgaacatcgagatgcacaaacaggctgagatcgtcaaaaggctgaacgggatttgtgcccaggtcctgccctacctctcccaagagcaccagcagcaggtcttgggagccattgagagggccaagcaggtcaccgctcccgagctgaactctatcatccgacagcagctccaagcccaccagctgtcccagctgcaggccctggccctgcccttgaccccactacccgtggggctgcagccgccttcgctgccggcggtcagcgcaggcaccggcctcctctcgctgtccgcgctgggttcccaggcccacctctccaaggaagacaagaacgggcacgatggtgacacccaccaggaggatgatggcgagaagtcggattagcagggggccgggacagggaggttgggaggggggacagaggggagacagaggcacggagagaaaggaatgtttagcacaagacacagcggagctcgggattggctaaactcccatagtatttatggtggccgccggcgggggccccagcccagcttgcaggccacctctagctttcttcctaccccattcccggcttccctcctcctcccctgcagcctggttaggtggatacctgccctgacatgtgaggcaagctaaggcctggagggtcagatgggagaccaggtcccaagggagcaagacctcgcgaagcgcagcagccccggcccttcccccgttttgaacatgtgtaaccgacagtctgcctgggccacagccctctcaccctggtactgcatgcacgcaatgctagctgcccctttcccgtcctgggcaccccgagtctcccccgaccccgggtcccaggtatgctcccacctccacctgccccactcaccacctctgctagttccagacacctccacgcccacctggtcctctcccatcgcccacaaaagggggggcacgagggacgagcttagctgagctgggaggagcagggtgagggtgggcgacccaggattccccctccccttcccaaataaagatgagggtactaaagttgtcttggtttttattttattattatttttttctttttccagtatactagcttgtcttttaagaaaggggatattaaaaaaaaaaaaagacaaaagtgtttttaaaaaaaagcaacacccacacctgtgtctgtatatagtcagcttatctcgtgttcaatcgtctgatctctacagagagaagtggaaaatgctgtatcaagggtgggcttagctgtgcctttccaataaagatgtgagaagcttc

SEQ ID NO: 37 - DNA, 5263 bp, Homo sapiens
cggggggggccgcgccgtgctagccgttgggcctgcctcggaggaggcgtcgccgccgccgctgccgctgccggcgccgttgccgctgccgggaaacacaaggaaagggaaccagcgcagcgtggcgatgggcgggggtagagccccgccggagaggctgggcggctgccggtgacagactgtgccctgtccacggtgcctcctgcatgtcctgctgccctgagctgtcccgagctaggtgacagcgtaccacgctgccaccatgaatgaggtgtctgtcatcaaagaaggctggctccacaagcgtggtgaatacatcaagacctggaggccacggtacttcctgctgaagagcgacggctccttcattgggtacaaggagaggcccgaggcccctgatcagactctaccccccttaaacaacttctccgtagcagaatgccagctgatgaagaccgagaggccgcgacccaacacctttgtcatacgctgcctgcagtggaccacagtcatcgagaggaccttccacgtggattctccagacgagagggaggagtggatgcgggccatccagatggtcgccaacagcctcaagcagcgggccccaggcgaggaccccatggactacaagtgtggctcccccagtgactcctccacgactgaggagatggaagtggcggtcagcaaggcacgggctaaagtgaccatgaatgacttcgactatctcaaactccttggcaagggaacctttggcaaagtcatcctggtgcgggagaaggccactggccgctactacgccatgaagatcctgcggaaggaagtcatcattgccaaggatgaagtcgctcacacagtcaccgagagccgggtcctccagaacaccaggcacccgttcctcactgcgctgaagtatgccttccagacccacgaccgcctgtgctttgtgatggagtatgccaacgggggtgagctgttcttccacctgtcccgggagcgtgtcttcacagaggagcgggcccggttttatggtgcagagattgtctcggctcttgagtacttgcactcgcgggacgtggtataccgcgacatcaagctggaaaacctcatgctggacaaagatggccacatcaagatcactgactttggcctctgcaaagagggcatcagtgacggggccaccatgaaaaccttctgtgggaccccggagtacctggcgcctgaggtgctggaggacaatgactatggccgggccgtggactggtgggggctgggtgtggtcatgtacgagatgatgtgcggccgcctgcccttctacaaccaggaccacgagcgcctcttcgagctcatcctcatggaagagatccgcttcccgcgcacgctcagccccgaggccaagtccctgcttgctgggctgcttaagaaggaccccaagcagaggcttggtggggggcccagcgatgccaaggaggtcatggagcacaggttcttcctcagcatcaactggcaggacgtggtccagaagaagctcctgccacccttcaaacctcaggtcacgtccgaggtcgacacaaggtacttcgatgatgaatttaccgcccagtccatcacaatcacaccccctgaccgctatgacagcctgggcttactggagctggaccagcggacccacttcccccagttctcctactcggccagcatccgcgagtgagcagtctgcccacgcagaggacgcacgctcgctgccatcaccgctgggtggttttttccccctaactttttacttagcctttttggtttgtgtccccacccccacctcctcaccccctttccagttcttcttcaggcccctcccagacgcaccccagcggcccctgcagcccctgcctccagcctccagcctcacctttgtgcccagactcgcatttggaagactccacctcccgcccaggcctgggctgttgggcggttggagattcaggttttaatccacacaagccccagtgaggggtgaagcatggcgcctggggcctgcctgagtttctggcctgggtgtcgtgctggtgtctgcctccgcgctgctgcatctggacgaaggctgccttctggtgggacgcgacacccggcagacagtggtgctgccttccaggccccgtggcctaggctcggagtggccaggcacggggcggtccaatcccccacccgctgtccccctatgggggcagaaaagcaataatgtccaggggcaggcaggggcccttgggagctgcagggctgggggttagggctgctccctggtgaatggagtcagatcctaggatctgtaccatggggaaccaggagtggccgggctgggtgccgcctcctggtccggcctcctccccaccaaactgtcctcaccctatggatgaggcaggaggaacatttggggccaaacctgcctgcctcccagccccgtgccttactagggcttccttccagctggccttacctcccgctggaccctgggcctggcctggccccactgggggctatgggctgggctcaccctctcctctgcgggggtggagggccaccagccttggctgttacaatcttacaccggacagtattgggccccatggacttggtcagggaggggtgggggtgggcatctctggtacctattggggtggggggcctctgaaaagggaggctcctaggcccccctcacccctccctctccccagggccccacgttctgcagccttaaggttgaacatgagtgcacgtccatgtcagtgctgtgggactcctgtgcgtgcctcggactgcgtgtgtcggcgggacgcaggcacacgtgggtgtgtgtgcatgtgtgtttgtgtgagggcagcgtgtcctccagtgtgcatggtgtgtgggcttgggccccatccctggcccgagcatttcatcctgtgggggaggggtgctgacctagtgggaggagccccactgtgatccatgagctgccctgcccacgcctcccctccctgtagcaacacctctgggtgtttggagtttagcttttgtgggtttgctctccctatcccatctcctgtactacacagttcatggcagggtggggaggggtggggttggttcgggtgggtgagggtctttttcctctgtgtgcgatgttgttatctgacagttctccgtccctactggcctttctcctcgtcttcatatttgtacggtacaagcaataaagacactcatttcagaccagggcccagcctgcactcacgccagcccaaccactctgggctttgccttggtgatggagtcagacccctgggccccagctcctcctgtactagccgttcccttcagcaaggagggcactgagctcagggtgagggcagctggggtgtgtgcaggagctcaggctggagagggtgggtggagctggtgctgtggggctgaggggtatgggaaggctccccgcatgtgggggtggggtggacagagaccactccaggccctcagtgctgcttaggctaagagaggtggggtggagggacagggctggaagatctgggtagcccagaatgaggagggtgcctgtgctgtcactgaatgagagggagtggttcattccacccggctgccgagcctcagaggggggcattcctatcctgccccacctccctgtttatgctgccacctggaagccttgaggcccccaaattccagtacagacccagtggtgtgttcatggtggcgtggttgctgtcacctgggagctcctgagcgtttggttagaaccctgttcagcttggggtcagccctcccctagtcactgccctttagcctggatgtgtctgggcccctgcacttcccgtgcttgagtcacgtggctgcatggccgggcgctggccggatggaacacctcccccagcaagggaccagggaccagagccctggcctgccctgctgagccctgctgtgcagagggcctggcacagatgaatttgagattttgccgcaaggtgttagcacttcacacccattgagtctttgagattttaagtgaatgtaagcagaaaaagtcagatccaatttacagaaatcagagttagctacagctaggactcgtttggttggggttttttagtttgtctttctaaagtcatgtggaccttaatttaattacaaaagtctaccctggtggtcataaaataggcaggcctatgaagaaaggccttttactcttccatctcatcccagccccgagttgacccacgttgctgctcctcacaccatggtgatgcaggtctcgtagtgtgggcacaggcctggctacctcatctttttagtgcctctctcctcttccacaggatggggtcccacagctgcagcagctggccccgtagttgagcatgtgtggttatcctgtagagcttttcccaagaagggtgtttgaacttagagtcttaataaaatcttaccaaataaattttgagtagaataatcgtcttttgcaatgtacattttaaaaatttcacacattcttttttgtatataaagaacagtgactgggcacagtggctcatgcctgtaatcccagcaatttgggaggccgaggcgggcgggtctcttgaggccaggggttcgagaccagcctgggcatcatagggagaccttcatctctacaaaaaatacaaaaattagctgggcatggtggtgcatgcctgcaatcccagctaacttggaaggctgaggtgaggtgggaagatcacttgagcccaggagtttgaggctgcagtgagctatgattgcggcactgcactgcagcctgggacaatgagactgtgtctctaaaaataaaaaaaaaaaaaacatgatacatgctattaaaaaagacagcaaagcaggagtataagaaaggaaattcacccgaggtcgcagggccttgagtactcattttggtgctgattacctctctgcaaatggacacggcatcataaattggtagtttcctgctctttttgtgtaatcttttccagttaatgtgaagcctctgggggctgccctcgtgcactgatggttgtgtggagtcgggggcggcagtgcgattcccttttagctgctgcatggggggaactcaggctttccagctgcttcctggggttccatggggtagacccctcaaccgcttcagctgccccgttaacaggaattgacttggtttcgtttggtgctaccagcagtcctgtaataaactagctatccatctgta

SEQ ID NO: 38 - DNA, 2700 bp, Homo sapiens
tcatggctgcgcgtgcagacgtgcgtcatcgccgcgcgccgcgccgagcgaatctcggagtcggtgggtgcagatggcggcggcagttgtggtggcggagggggacagcgactcccggcccggacaggagttgttagtggcctggaacaccgtgagcaccggcctggtgccgccggctgcgctggggctggtgtcttcccggaccagcggtgcagtcccgccaaaggaagaggagctccgggcggcggtggaggttctgaggggccacgggctacactcggtcctggaggagtggttcgtggaggtgctgcagaacgatctgcaggccaacatctcccctgagttctggaatgccatctcccaatgcgagaactctgcggatgagccccagtgccttttgctactccttgacgcttttggcctgctggagagccgcctggatccctacctgcgtagcctagagctgctggagaaatggactcgcctgggcttgctgatgggcactggtgctcaggggctgcgagaagaagtccacactatgttgcgcggagtcttgttctttagcacccccagaaccttccaagagatgatccagcgtctgtatgggtgcttcttgagagtctatatgcagagtaagaggaagggggaagggggcacagacccggaactggaaggggagctggacagccggtatgcccgtcgccggtactaccggctcctgcagagcccgctgtgtgcagggtgcagcagtgacaagcaacagtgctggtgtcgccaggctctggagcagttccatcagctcagccaggtcttacacaggctcagtctgctggagcgggtcagtgccgaggctgtgaccaccaccctgcaccaggtgacccgggagaggatggaggaccgttgccggggcgagtacgagcgctccttcctgcgtgagttccacaagtggatcgagcgggtggtcggctggctcggcaaggtgttcctgcaggacggccccgccaggcccgcatctcccgaggccggcaacaccctgcgccgctggcgctgccacgtgcaaaggttcttctaccgcatctacgccagcctgcgcatcgaggagctcttcagcatcgtccgagacttcccagactcccggccagccatcgaggacctcaagtactgcctggagaggacggaccagaggcagcagctgctcgtgtccctcaaggctgccctggagactcggctcctgcatccaggcgtcaacacgtgtgacatcatcaccctctatatctctgccatcaaggcgctgcgcgtgctggacccttccatggtcatcctggaggtggcctgtgagcctatccgccgctacctgaggacgcgggaggacacagtgcggcagattgtggctgggctgacgggggactcggacgggacaggggacctggctgttgagctgtccaagaccgacccggcgagcctggagacaggccaggacagtgaggatgactcaggcgagccagaggactgggtcccggaccctgtggatgccgatccagggaagtcgagctccaagcggcgttcatcggacatcatcagcctgctggtcagcatctacggcagcaaggacctcttcatcaatgagtaccgctcgctgctggccgaccgcctgctgcaccagttcagcttcagccccgagcgggagatccgcaacgtggagctgctgaagctgcgctttggcgaggccccaatgcacttctgtgaagtcatgctgaaggacatggcggactcccgccgcatcaatgccaacatccgggaggaggatgagaagcggccagcagaggagcagccaccgttcggggtctacgctgtcatcctgtccagtgagttctggccgcccttcaaggacgagaagctggaggtccccgaggatatcagggcagccctggaggcttactgcaagaagtatgagcagctcaaggccatgcggaccctcagttggaagcacaccctgggcctggtgaccatggacgtggagctggccgaccgcacgctgtctgtggcggtcaccccagtacaggcggtgatcttgctgtattttcaggaccaagccagctggaccctggaggaactgagcaaggcggtgaagatgcccgtggcgctgctgcggcggcggatgtccgtgtggctgcagcagggtgtgctgcgtgaggagccccccggcaccttctctgtcattgaggaggagcggcctcaggaccgggacaacatggtgctcattgacagtgacgacgagagcgactccggcatggcctcccaggccgaccagaaggaggaggagctgctgctcttctggacgtacatccaggccatgctgaccaacctggagagcctctcactggatcgtatctacaacatgctccgcatgtttgtggtgactgggcctgcactggccgagattgacctgcaggagctgcagggctacctgcagaagaaggtgcgggaccagcagctcgtctactcggccggcgtctaccgcctgcccaagaactgcagctgacacatcgcccgcccgcccgcccgcccgccaggcgctgccctgcaggtgctctcgtcctcccgtgccagcccccgcccgcccgtgtcccagaatgcactgctgaggagcatgcccacccccacccccgcagtgtgcagattaaagcaagtcagatcatc

SEQ ID NO: 39 - DNA, 2200 bp, Homo sapiens
ccaccctgggcccgcccccggctccatcttgcgggagaccgggttgggctgtgacgctgctgctggggtcagaatgtcatacccaggctatcccccaacaggctacccacctttccctggatatcctcctgcaggtcaggagtcatcttttcccccttctggtcagtatccttatcctagtggctttcctccaatgggaggaggtgcctacccacaagtgccaagtagtggctacccaggagctggaggctaccctgcgcctggaggttatccagcccctggaggctatcctggtgccccacagccagggggagctccatcctatcccggagttcctccaggccaaggatttggagtcccaccaggtggagcaggcttttctgggtatccacagccaccttcacagtcttatggaggtggtccagcacaggttccactacctggtggctttcctggaggacagatgccttctcagtatcctggaggacaacctacttaccctagtcagatcaatacagattctttttcttcctatcctgttttctctcctgtttctttggattatagcagtgaacctgccacagtgactcaggtcactcaaggaactatccgaccagctgccaacttcgatgctataagagatgcagaaattcttcgtaaggcaatgaagggttttgggacagatgagcaggcaattgtggatgtggtggccaaccgttccaatgatcagaggcaaaaaattaaagcagcatttaagacctcctatggcaaggatttaatcaaagatctcaaatcagagttaagtggaaatatggaagaactgatcctggccctcttcatgcctcctacgtattacgatgcctggagcttacggaaagcaatgcagggagcaggaactcaggaacgtgtattgattgagattttgtgcacaagaacaaatcaggaaatccgagaaattgtcagatgttatcagtcagaatttggacgagaccttgaaaaggacattaggtcagatacatcaggacattttgaacgtttacttgtgtccatgtgccagggaaatcgtgatgagaaccagagtataaaccaccaaatggctcaggaagatgctcagcgtctctatcaagctggtgaggggagactagggaccgatgaatcttgctttaacatgatccttgccacaagaagctttcctcagctgagagctaccatggaggcttattctaggatggctaatcgagacttgttaagcagtgtgagccgtgagttttccggatatgtagaaagtggtttgaagaccatcttgcagtgtgccctgaaccgccctgccttctttgctgagaggctctactatgctatgaaaggtgctggcacagatgactccaccctggtccggattgtggtcactcgaagtgagattgaccttgtacaaataaaacagatgttcgctcagatgtatcagaagactctgggcacaatgattgcaggtgacacgagtggagattaccgaagacttcttctggctattgtgggccagtaggagggatttttttttttttaatgaaaaaaaatttctattcatagcttatccttcagagcaatgacctgcatgcagcaatatcaaacatcagctaaccgaaagagctttctgtcaaggaccgtatcagggtaatgtgcttggtttgcacatgttgttattgccttaattctaattttattttgttctctacatacaatcaatgtaaagccatatcacaatgatacagtaatattgcaatgtttgtaaaccttcattcttactagtttcattctaatcaagatgtcaaattgaataaaaatcacagcaatctctgattctgtgtaataatattgaataattttttagaaggttactgaaagctctgccttccggaatccctctaagtctgcttgatagagtggatagtgtgttaaaactgtgtactttaaaaaaaaattcaacctttacatctagaataatttgcatctcattttgcctaaattggttctgtattcataaacactttccacatagaaaatagattagtattacctgtggcaccttttaagaaagggtcaaatgtttatatgcttaagatacatagcctacttttttttcgcagttgttttctttttttaaattgagttatgacaaataaaaaattgcatatatttaaggtgt

SEQ ID NO: 40 - DNA, 4192 bp, Homo sapiens
acccaccgaaccccgcccgcgccgggagcatctcgcgtccccaacgggcccccgggtcggtttccgcggtggccatgactgcggccgtgttcttcggctgcgccttcattgccttcgggcctgcgctcgccctttatgtcttcaccatcgccaccgagccgttgcgtatcatcttcctcatcgccggagctttcttctggttggtgtctctactgatttcgtcccttgtttggttcatggcaagagtcattattgacaacaaagatggaccaacacagaaatatctgctgatctttggagcgtttgtctctgtctatatccaagaaatgttccgatttgcatattataaactcttaaaaaaagccagtgaaggtttgaagagtataaacccaggtgagacagcaccctctatgcgactgctggcctatgtttctggcttgggctttggaatcatgagtggagtattttcctttgtgaataccctatctgactccttggggccaggcacagtgggcattcatggagattctcctcaattcttcctttattcagctttcatgacgctggtcattatcttgctgcatgtattctggggcattgtattttttgatggctgtgagaagaaaaagtggggcatcctccttatcgttctcctgacccacctgctggtgtcagcccagaccttcataagttcttattatggaataaacctggcgtcagcatttataatcctggtgctcatgggcacctgggcattcttagctgcgggaggcagctgccgaagcctgaaactctgcctgctctgccaagacaagaactttcttctttacaaccagcgctccagataacctcagggaaccagcacttcccaaaccgcagactacatctttagaggaagcacaactgtgcctttttctgaaaatccctttttctggtggaattgagaaagaaataaaactatgcagatatgcgttccattcacttggctttcacacaactgctctccgaaaggggtgctcagtggtgtgcgtcctggctgcacgagaatcacctgggacagtgtaaagccgactgattctgggctccaccttccagagctaattggcctgggcacgtggtgagttttaaaagcttcccaggtgattctgatgtgcagccatgttgagacccactggtttggtatccaaataggagcttcctgagaacaccttaagtggatgagaatctggtctttagctgtctcctaactcaactcgtgctgagcaagtaagtatctgaatgtcaaatcctggttatcttttatcttcctaagttctgaagtcacaaaaggctaaagggctatcacccctgctcactgtttgcgtgtacttcaccatcttaggagaacacggtaggttgggcttctaaatgcaataataaattacgctgactgtggtaacttagccaaagtaagatactgattaagccgtatttttctgaagtgcttccattccaggttttgctttctgaggcattacattgtttttgagtatagattacattttattaactaaaaatgattgttttgtgacttccttgggaaggtattttaaaatcaggaatttttatgcaatgtctataagcctgtttaaagctttccatgggctctgccccaaggccgttggctgcagcgttcaccatctgagtgccagttgctggactagttgaggtgaagtgcattgttttctctctgagcagctgtgcggggagctgagtgatgtgccctgggacaggcttcactggagctggtggaagtataaccagaagcacaaggaaatgagccaaaagggtgtcattgacacttttcatttgctcctgtgatactaacaacactttcacccaaatggcttaatgtaatattggaaatagatcttaaactgccaaatctcacactattgcataatccatatgctctttagatctagtcagtgtctctgggttttggtagcagatacagcgttccctttacaggaatacccaaggtgttctttcagcttccagacaggtcctttgatttcctttataaagggaaaattctggcaaatcgtgcctttactattagaaattgttcccagttgatgtcttttggggagctggtggcatgaaatgcaaatgacctatacattaaagtgatgtctcagtgaataccatacatgcagtagaacattcagaagagaggagcagcaatcctgaggggctgggggagtgacagtggcaggacggatgggcgggtttgacagattgtggtgggaagaagaatgatcatgtttaaagctaacatagccagtgttttgggctagccacacatcattccagagaccaaaaccttactcatgaactagacctttatcgatatcagtgaacccccatgtttaaaatattagaatgtttagagataaaatagagataatagagataaaagaagaggagggcttctatcaatgctgtaaacagtctgataagcgactgtggttattcccctaaagtttacttcagcactaacactagtgcttccgctggagtttgcagttttccagctttatacaggattttcctttgactggaagagtcaaggatatagagactcaacagtgacatttattgtacaacatcaaggggaataggatactcatcaaactgggattattcttatcaaaacatggtcttctttgaataagaaaaatacatagttggttattatggacttaaaactgtgttaaatggatattctgataaaatatttgctgctctgtagagtgtggaaagtctgagaatattagctttactcatcttgagctttgaggatgttctctgtacgccgatggtttcatattaactaaaaaagctgggtattgtaaaatctcatttataaaaactcagatgagaagaaaattttctttgatggtgagactgttgtcttagttcaggaaattatttaataatcctttgttacctgtgaatgaaggaactttgtaattctgatttatcgtaaaacatgagcctttccagagtcagcttagacactgttgtcgcaaatagccatgctttgccttatgccaaggaggcccagagggagggcctagtcttcctctgttgctgtacatatattgaaatgcttttttttttttattttgcatttgttatctataatgagctttctgagccctgatattatgtgagacaaacaggagttattgatgttatacactcccttccattcaggattttctgcttggagggaaatatgttgaccttagagaattgtgaatattgttgcaattcttgaatatattaccatgtgaataatagagactgtgttgctctctagtataagctatatttatttttgattcatttgaattactagttataactggagaaattttgttacctctatcctggcttgcctgactggctgtataatagcagcagcctcttttagagcatcttaatgaaaacatggatgaaaggaattaatgatgatatctgcagactgcgtagaaaatggcttttgttcccagcgttaacattttcttctcaatcacatttcaatgtttgtggagagtggcagattcacaccagaaacactaggtgttcatatccatagcatggatgcagaataagcagttgggagagaagcttcttcctacctggtactcctcccattcacctcagcccagccccagacaggcgttagcattcagtgtgggccctcaggcagccctgaagcctggctgggtcatcagatgggggcagcctgtgacgggcaccagcggcctgattccagggaagagttcctggagggtgttggctgtttttgttagctcagtttttttctgggctccaccattcctaactccaggtagacaagatagatgtcacacacaacaattttaaagtattttgcttagtgcattttgtttatgattgcagtgtttgtttcttatttaataggctttttacttcattctattaaattttagtgtttagaagaggcgggtactgtcactgtgtaaaatatgtaatattttatatgttataccatgtcatatatacttgcaatatcagaccttgcattcaatatacaatgcaattgactctttgcagacctgcatttttcagtgaacaataaaaagattgtctggcactcctc

SEQ ID NO: 41 - DNA, 2126 bp, Homo sapiens
aaagccgaccgagacggagccgctgtcaactctccaactcagctcagctgatcggttgccgccgccgccgccgccagattctggaggcgaagaacgcaaagctgagaacatggacgttaatatcgccccactccgcgcctgggacgatttcttcccgggttccgatcgctttgcccggccggacttcagggacatttccaaatggaacaaccgcgtagtgagcaacctgctctattaccagaccaactacctggtggtggctgccatgatgatttccattgtggggtttctgagtcccttcaacatgatcctgggaggaatcgtggtggtgctggtgttcacagggtttgtgtgggcagcccacaataaagacgtccttcgccggatgaagaagcgctaccccacgacgttcgttatggtggtcatgttggcgagctatttccttatctccatgtttggaggagtcatggtctttgtgtttggcattacttttcctttgctgttgatgtttatccatgcatcgttgagacttcggaacctcaagaacaaactggagaataaaatggaaggaataggtttgaagaggacaccgatgggcattgtcctggatgccctagaacagcaggaagaaggcatcaacagactcactgactatatcagcaaagtgaaggaataaacataacttacctgagctagggttgcagcagaaattgagttgcagcttgcccttgtccagacctatgttctgcttgcgtttttgaaacaggaggtgcacgtaccacccaattatctatggcagcatgcatgtataggccgaactattatcagctctgatgtttcagagagaagacctcagaaaccgaaagaaaaccaccaccctcctattgtgtctgaagtttcacgtgtgtttatgaaatctaatgggaaatggatcacacgatttctttaagggaattaaaaaaaataaaagaattacggcttttacagcaacaatacgattatcttataggaaaaaaaaaatcattgtaaagtatcaagacaatacgagtaaatgaaaaggctgttaaagtagatgacatcatgtgttagcctgttcctaatcccctagaattgtaatgtgtgggatataaattagtttttattattctcttaaaaatcaaagatgatctctatcactttgccacctgtttgatgtgcagtggaaactggttaagccagttgttcatacttcctttacaaatataaagatagctgtttaggatattttgttacatttttgtaaatttttgaaatgctagtaatgtgttttcaccagcaagtatttgttgcaaacttaatgtcattttccttaagatggttacagctatgtaacctgtattattctggacggacttattaaaatacaaacagacaaaaaataaaacaaaacttgagttctatttaccttgcacattttttgttgttacagtgaaaaaaatggtccaagaaaatgtttgccatttttgcattgtttcgtttttaactggaacatttagaaagaaggaaatgaatgtgcattttattaattccttaggggcacaaggaggacaataatagctgatcttttgaaatttgaaaaacgtctttagatgaccaagcaaaaagactttaaaaaatggtaatgaaaatggaatgcagctactgcagctaataaaaaattttagatagcaattgttacaaccatatgcctttatagctagacattagaattatgatagcatgagtttatacattctattatttttcctccctttctcatgtttttataaataggtaataaaaaatgttttgcctgccaattgaatgatttcgtagctgaagtagaaacatttaggtttctgtagcattaaattgtgaagacaactggagtggtacttactgaagaaactctctgtatgtcctagaataagaagcaatgatgtgctgcttctgatttttcttgcattttaaattctcagccaacctacagccatgatctttagcacagtgatatcaccatgacttcacagacatggtctagaatctgtacccttacccacatatgaagaataaaattgattaaaggtttttttggtgagactttattt

SEQ ID NO: 42 - DNA, 1977 bp, Homo sapiens
gggagcgcgaacctgaggaggaagaaacggggctagcgcgcaggcccagaacggtccgagccgcggcagtcggcgacgcctcagagcggaagagggaagtgaatcaggcgccgggtagtgggttgctgggctgggcttgctgaggtagaggcagcgccaagaagaggcctttgccgctggtcgggattgggatgtcgaagaacacagtgtcgtcggcccgcttccggaaggtggacgtggatgaatatgacgagaacaagttcgtggacgaagaagatgggggcgacggccaggccgggcccgacgagggcgaggtggactcctgcctgcggcaaggaaacatgacagctgccctacaggcagctctgaagaacccccctatcaacaccaagagtcaggcagtgaaggaccgggcaggcagcattgtcttgaaggtgctcatctcttttaaagctaatgatatagaaaaggcagttcaatctctggacaagaatggtgtggatctcctaatgaagtatatttataaaggatttgagagcccgtctgacaatagcagtgctatgttactgcaatggcatgaaaaggcacttgctgctggaggagtagggtccattgttcgtgtcttgactgcaagaaaaactgtgtagtctggcaggaagtggattatctgcctcgggagtgggaattgctggtacaaagaccaaaacaaccaaatgccaccgctgccctgtgggtagcatctgtttctctcagctttgccttcttgctttttcatatctgtaaagaaaaaaattacatatcagttgtcctttaatgaaaattgggataatatagaagaaattgtgttaaaatagaagtgtttcatcctttcaaaaccatttcagtgatgtttataccaatctgtatatagtataatttacattcaagtttaattgtgcaacttttaacccctgttggctggttttttgttctgttttgttttgtattatttttaactaatactgagagatttggtcagaatttgaggccagtttcctagctcattgctagtcaggaaatgatatttataaaaaatatgagagactggcagctattaacattgcaaaactggaccatatttcccttatttaataagcaaaatatgtttttggaataagtggtgggtgaataccactgctaagttatagctttgtttttgcttgcctcctgattatctgtactgtgggtttaagtatgctactttctctcagcatccaataatcatggcccctcaatttatttgtggtcacccagggttcagagcaagaagtcttgctttatacaaatgtatccataaaatatcagagcttgttgggcatgaacatcaaacttttgttccactaatatggctctgtttggaaaaaactgcaaatcagaaagaatgatttgcagaaagaaagaaaaactatggtgtaatttaaactctgggcagcctctgaatgaaatgctactttctttagaaatataatagctgccttagacattatgaggtatacaactagtatttaagataccatttaatatgccccgtaaatgtcttcagtgttcttcagggtagttgggatctcaaaagatttggttcagatccaaacaaatacacattctgtgttttagctcagtgttttctaaaaaaagaaactgccacacagcaaaaaattgtttactttgttggacaaaccaaatcagttctcaaaaaatgaccggtgcttataaaaagttataaatatcgagtagctctaaaacaaaccacctgaccaagagggaagtgagcttgtgcttagtatttacattggatgccagttttgtaatcactgacttatgtgcaaactggtgcagaaattctataaactctttgctgtttttgatacctgctttttgtttcattttgttttgttttgtaaaaatgataaaacttcagaaaataaaatgtcagtgttg

SEQ ID NO: 43 - DNA, 2608 bp, Homo sapiens
gcccacaaggggcacagccgggcagtcaggaaccggggctgccggctgggctggcctgcaaagaagagggaagggccggaactgcaaccgcagtggcggggagtgcgagggggcggcagaggtcaggggaggcgggggcccagcacacgtccccagtggcagcgggagcggcagctacgggttcgcggagcccccgaccccccaagggctagaggagcgctcggcggaccaaagaaagcccgcgagcggctgcgcgcccaccaataggtgcggggctcggagccgcgcagcctgcgccgtccctccctccgcccccgccccgccgccgccgccgccgccgcctccccctcctcctgctcctgccttggctcctccgccgcgcgtctcgcactccgagagccgcagcggcagcggcgcgtcctgcctgcagagagccaggccggagaagccgagcggcgcagaggacgccagggcgcgcgccgcagccacccaccctccggaccgcggcagctgctgacccgccatcgccatggcccgcgggaaagccaaggaggagggcagctggaagaaattcatctggaactcagagaagaaggagtttctgggcaggaccggtggcagttggtttaagatccttctattctacgtaatattttatggctgcctggctggcatcttcatcggaaccatccaagtgatgctgctcaccatcagtgaatttaagcccacatatcaggaccgagtggccccgccaggattaacacagattcctcagatccagaagactgaaatttcctttcgtcctaatgatcccaagagctatgaggcatatgtactgaacatagttaggttcctggaaaagtacaaagattcagcccagagggatgacatgatttttgaagattgtggcgatgtgcccagtgaaccgaaagaacgaggagactttaatcatgaacgaggagagcgaaaggtctgcagattcaagcttgaatggctgggaaattgctctggattaaatgatgaaacttatggctacaaagagggcaaaccgtgcattattataaagctcaaccgagttctaggcttcaaacctaagcctcccaagaatgagtccttggagacttacccagtgatgaagtataacccaaatgtccttcccgttcagtgcactggcaagcgagatgaagataaggataaagttggaaatgtggagtattttggactgggcaactcccctggttttcctctgcagtattatccgtactatggcaaactcctgcagcccaaatacctgcagcccctgctggccgtacagttcaccaatcttaccatggacactgaaattcgcatagagtgtaaggcgtacggtgagaacattgggtacagtgagaaagaccgttttcagggacgttttgatgtaaaaattgaagttaagagctgatcacaagcacaaatctttcccactagccatttaataagttaaaaaaagatacaaaaacaaaaacctactagtcttgaacaaactgtcatacgtatgggacctacacttaatctatatgctttacactagctttctgcatttaataggttagaatgtaaattaaagtgtagcaatagcaacaaaatatttattctactgtaaatgacaaaagaaaaagaaaaattgagccttgggacgtgcccatttttactgtaaattatgattccgtaactgacttgtagtaagcagtgtttctggcccctaagtattgctgccttgtgtattttatttagtgtacagtactacaggtgcatactctggtcatttttcaagccatgttttattgtatctgttttctactttatgtgagcaaggtttgctgtccaaggtgtaaatattcaacgggaataaaactggcatggtaattttttttttttttttttttttgttttttggctctttcaaaggtaatggcccatcgatgagcatttttaacatactccatagtcttttcctgtggtgttaggtctttatttttatttttttcctgggggctggggtgggggtttgtcatgggggaactgccctttaaattttaagtgacactacagaaaaacacaaaaaggtgatgggttgtgttatgcttgtattgaatgctgtcttgacatctcttgccttgtcctccggtatgttctaaagctgtgtctgagatctggatctgcccatcactttggctagtgacagggctaattaatttgctttatacattttcttttactttccttttttcctttctggaggcatcacatgctggtgctgtgtctttatgaatgttttaaccattttcatggtggaagaattttatatttatgcagttgtacaattttatttttttctgcaagaaaaagtgtaatgtatgaaataaaccaaagtcacttgtttgaaaataaatctttattttgaactttataaaaagcaatgcagtaccccatagactggtgttaaatgttgtctacagtgcaaaatccatgttctaacatatgtaataattgccaggagtacagtgctcttgttgatcttgtattcagtcaggttaaaacaacggacaataaaagaatgaacacattc

SEQ ID NO: 44 - DNA, 7580 bp, Homo sapiens
atgacggacaacatcccgctgcagccggtgcgccagaagaagcggatggacagcaggccccgcgccgggtgctgcgagtggctgagatgctgcggtggaggggaggccaggccccgcactgtctggctggggcaccccgagaagagagaccagaggtatcctcggaatgtcatcaacaatcagaagtacaatttcttcacctttcttcctggggtgctgttcaaccagttcaaatactttttcaacctctatttcttacttcttgcctgctctcagtttgttcccgaaatgagacttggtgcactctatacctactgggttcccctgggcttcgtgctggccgtcactgtcatccgtgaggcggtggaggagatccgatgctacgtgcgggacaaggaagtcaactcccaggtctacagccggctcacagcacgaggcacagtgaaggtgaagagttctaacatccaagttggagaccttatcatcgttgaaaagaaccagcgggtccctgccgacatgatcttcctgaggacatcagaaaaaaacgggtcatgcttcttgcggacggatcagctggatggggagacggactggaagctgcggcttcccgtggcctgcacgcagaggctccccacggccgccgaccttcttcagattcgatcgtatgtgtacgcagaagagccaaatattgacattcacaacttcgtgggaacttttacccgagaagacagcgaccccccgatcagcgagagcctgagcatagagaacacgctgtgggctggcactgtggtcgcatcaggtactgttgtgggtgttgttctttacactggcagagaactccggagtgtcatgaatacctcaaatccccgaagtaagatcggcctgttcgacttggaagtgaactgcctcaccaagatcctctttggtgccctggtggtggtctcgctggtcatggttgcccttcagcactttgcaggccgttggtacctgcagatcatccgcttcctcctcttgttttccaacatcatccccattagtttgcgtgtgaacctggacatgggcaagatcgtgtacagctgggtgattcgaagggactcgaaaatccccgggaccgtggttcgctccagcacgattcctgagcagctgggcaggatttcgtacttactcacagacaagacaggcactcttacccagaacgagatgattttcaaacggctccatctcggaacagtagcctacggcctcgactcaatggacgaagtacaaagccacattttcagcatttacacccagcaatcccaggacccaccggctcagaagggcccaacgctcaccactaaggtccggcggaccatgagcagccgcgtgcacgaagccgtgaaggccatcgcgctctgccacaacgtgactcccgtgtatgagtccaacggtgtgactgatcaggctgaggccgagaagcagtacgaagactcctgccgcgtataccaggcatccagccccgatgaggtggccctggtacagtggacggaaagtgtgggcttaaccctggtgggccgagaccagtcttccatgcagctgaggacccctggcgaccagatcctgaacttcaccatcctacagatcttccctttcacctatgaaagcaaacgtatgggcatcatcgtgcgggatgaatcaactggagaaattacgttttacatgaagggagcagatgtggtcatggctggcattgtgcagtacaatgactggttggaggaagagtgtggcaacatggcccgagaagggctgcgggtgctcgtggtggcaaagaagtctcttgcagaggagcagtatcaggactttgaagcccgctacgtccaggccaagctgagtgtgcacgaccgctccctcaaagtggccacggtgatcgagagcctggagatggagatggaactgctgtgcctgacgggcgtggaggaccagctgcaggcagatgtgcggcccacgctggagaccctgaggaatgctggcatcaaggtttggatgctgacaggggacaagctggagacagctacgtgcacagcgaagaatgcacatctggtgaccagaaaccaagacatccacgtttttcggctggtgaccaaccgcggggaggctcacctcgagctgaacgccttccgcaggaagcatgattgtgccctggtcatctcgggagactccctggaggtttgcctcaagtactatgagtacgagttcatggagctggcctgccagtgcccggccgtagtctgctgccgatgtgcccccacccagaaggcccagatcgtgcgcctgcttcaggagcgcacgggcaagctcacctgtgcagtaggggacggaggcaatgacgtcagcatgattcaggaatctgactgcggcgtgggagtggaaggaaaggaaggaaaacaggcttcgttggctgcagacttctccatcactcaatttaagcatcttggccggttgcttatggtgcatggccggaacagctacaagcggtcagccgccctcagccagttcgtgattcacaggagcctctgtatcagcaccatgcaggctgtcttttcctccgtgttttactttgcctccgtccctctctatcaaggattcctcatcattgggtactccacaatttacaccatgtttcctgtgttttctctggtcctggacaaagatgtcaaatcggaagttgccatgctgtatcctgagctctacaaggatcttctcaagggacggccgttgtcctacaagacattcttaatatgggttttgattagcatctatcaagggagcaccatcatgtacggggcgctgctgctgtttgagtcggagttcgtgcacatcgtggccatctccttcacctcgctgatcctcaccgagctgctcatggtggcgctgaccatccagacctggcactggctcatgacagtggcggagctgctcagcctggcctgctacatcgcctccctggtgttcttacacgagttcatcgatgtgtacttcatcgccaccttgtcattcttgtggaaagtctccgtcatcactctggtcagctgcctccccctctatgtcctcaagtacctgcgaagacggttctctccccccagctactcaaagctcacatcataggccgtgcgttcgctggagggggccctggtcttggcgcttccctgatggacagagctcaagttccatttatattaaccgccacctgtggattttgcagtaattgctaacacatgcagttttaatgggaagtggctctgcgcctaaacggagtcctaacgctgcatcaacgggagggagggtcctgaaagagacccatctgggcctgtctgaacccctcgttcttcatgtttaggtgaatatgaatatgttaaagctggtggctcagctgggagatttatatgggtcactgtgcgagcttccttatgacttgaattttgttgtcacatgataaaagtttctgtgtagctgaaggttgtagaaggcttgtgtgtgtgtgtgtgtgtgtgtgtgtgtgtgtgtgtgtttttaaagagtcctaatgtgtatgtactctttatgtctttcttgctcttacaaagaggtgtcagaaaaatagaaagctcttggtgtcggtttgggaggaaaagacagtgacatttggtaaaaagttatccacacaataatctccattcggaaatgctcagtatcgtctccagccagccctgcttatccaggttacactggattcctgggatcgtaaccagtaaatgagaggagagggagagagagtgtcctaagtccaatctgttatccttgatctgattcagcatccatagtgtgtgagttaacttcacctgccacctcgtaaaagaatttcagaggtgtgatcccgctttattgggacctggtaacaatcacaaagccagtggctgtttgagaaggacctcagacattttcagcagagttgttttagcaggaaacgtgccactgaatggcccctaaatgtgtcgacagtgtgataagagactcaactaattctttaggcaacatggcagatgtgactcagatcctccaagaccaaagcggaaaggtcagggggctgggactcttctcttccatagaagcctgtttcctgttaggaggcataatggaagatgaccccacaaaggcagaggcatctttcggaacaacactggtggcagctttcagaacaaggaacccctggtgggaggacgcccaagctacagcgttgggatctgggatctgttccactgccggcagatttcaaggggaacttgctgaaaggcagccagtggtgaagatttctcccctcccaggatggactacatgccggcatgtttcttataaagctgtggctgcttgtttcagaggaagggagtttgcagtcgcgggacgtggtagagcaaggcattcttgggttttcaagttgcttcttgcagaagccacatatgcatgccataagggttaagttggtggatctttaagagccaagtgtggttgagatcttggatttgcgtttacttcttgatgaatacatatccttcaaaccctctgcctggcgctacttctgtgtgcttcagagatgtacatcacagcctggtttctgatgcctactaactcctgctcttggagagctggagacacgaggatcagatagtcccttgcctttggagcactcttgataagcttttgtattttgtgttgtccttttaaaatgttctagaatgactttacgttgcaggtactggttaattggctgttgacaccacatctattttgtcttatgattctgcagttttgcagtacttttctctatctgattcagccatttctgccagagggaaaaggtcggcagaaaagatgtattgagtgaatagttaaggataggatctttgtccaaaaatttcagaaagattgagcaaatctgacgtattcattgagtgagtttctgtgttttcaaaggtggaggagaaatttgtgctggaagtttttaagcctccgttttcttggaaatcagtctgtaacactggcaagtcttaagatagtcccatttagactttgcagatgctgaacctggctctgtaacgctgggaagtcttaagatagtcctgtttagactttgcaaaccctgtacctggctttgctcggagattcgggatgctggctcctgcaggcagggcgtgtgggagcctcgtcagaaagttttagaggtttccagcagaagcagaatgaagatggtctccctggccttttccttaattctcaattttgattgaggtgcacaagttgacttttaaagccaacgcttaagatactgattgacatcttcaagggagaatgctcccaggaggggctgaagaagccatagttggaagtggaaggtactcgtcagtgttctccacaaacctttttactctgttgtctcagccgcactggggcggaggcggtcaagggtgagaagtaccgacactcaagtgcaaactgccacgtcgttggcccatcccatcagtgggcagctggctgacgccattcactggacggtccctgaacacctaggaatgcacacaccgtgcttctcagacactggagacgcaaaggcaggaggatgcagtccggtgagaggacacgatctttacctgcacaatcagactgtaagcccagcagagaaccccaggggcgcctgggtacttctcggaggtcatcttagttgtggtggggaagacaaagaaataagcaaacaagaaactagagttactatacaagaaactctcctgagtttgtaaaccttaagcataaggattcagttgacctttttcttggttcatcaatctggaaagaacttacataaagcgccattgacactgtcacctgggagctccatgggccgtaagtctttgacagccaatttaatttgaggtcagagggccttgaggtacacagtcagcactgtttgaacacttttcctgaaagcaaaactcacagctccctgcgccctctgacaacactagctatttctgccagagtaagaacttctattactattttattattgttcatatgtcttttgatgatggttgtgtgacagggggaagcaggatctatttggtttcttcccctccccccaccccttcctttttgtctctctttttttttctctaagaaaatcaccagactagtttttccatcttgagtaatttcttatgtgggacagttttgatcctcattttgaaagcatgcgtgtgcacatgtgtgttgcctgtggtgccaggtgagacaggtggcactaactccagctgcttggaaggcatcccaagggcgcatcttaaagttggagcagacctcccttttccagcccctggggccattagaccacgtgctggaactagcattgtaaaattcccatcccagttccactcccctgaagtgaaacccttttttttttgtgacagtaaatcttaaaaatcattgtctctttatgaacatttcctcagtttcttctctgctgaaaatgtaagccatgctactttttaatgtattttgaattttgtgctcattggaaattgatatgctaatgcctcccccaccccccgccagacttttctttttatactttgtcttgtttttactggggtaggctgggcatgcgtgcgtgcctttagggcagcattttaaacctttgccaaaattgcaaatgggacatgtacattcttctgctccatcctacttaaacacctatcagctatttttatctttaaccttttctgtatgtttgaagtgtgtggggggtgtgtgtgtgtgtgaaagagcgagagaatgatgtcatctaaagttttttgaagaattatttggttttcattgcattaaaattctatcactcccagctttgttttcatttaaaaaaatatacaaagagctttgtaaatacaacacattttatttctcccccttcttttaatgtacagcttttttgccacttatatatacttaaaatattcccatgaattatgtccagttcttcttggaaaaaaatttggttttgaatgaacctgcaaagcatcctgcagcgtgagcagctcctccacctggagctccgaagcatcttctcaggccaaagcggcattacccgtgaatctgtcttctccgccacagcatggtttgaggcgcagtctgttaatatagctgggccatgtcagtgactgttgtgtttgtggggtcaggtggggggcatggtatttgcaaaaaaaacaaattatggctaatttattattttgttgcagtggggttaactgtaaactcatgtaagagtctgtgatttcctcattggttgatctctctctctgtaatcctcattgcaaattttcaccaggacagcgttttttgattagaggggagctctggcacagtatgctttaatttagcaggaacttccagatgatttaaattctcgatgctgtgatgacacacatatgatctttcgtgtttctgagcgactctactttcattgtttgccagcgtggctcgttgctgttgcccaataaagcttgtgtacgttctgc

SEQ ID NO: 45 - DNA, 4725 bp, Homo sapiens
cgcttcatgtggcccggcccgcgacggccggcggctgggagcggcgaggcggcggcggcggcgagtggcggcccgcgaggcccgggaggcggtggccgaggcccaggcggtggcggcggcggcccaggaggcggcggacggggagctgcgggagcaggcccggcctggctctctagcggccgcctggctgcagcatgcgcgcccgccgggggctgctgcggctgccgcgccgctcgctgctcgccgcgctcttcttcttttctctctcgtcctcgctgctgtacttcgtctatgtggcgcccggcatagtgaacacctacctcttcatgatgcaagcccaaggcattctgatccgggacaacgtgagaacaatcggtgctcaggtttatgagcaggtgcttcggagtgcttatgccaagaggaacagcagtgtaaatgactcagattatcctcttgacttgaaccacagtgaaaccttcctgcaaactacaacatttcttcctgaagacttcacctactttgcaaaccatacctgccctgaaagactcccttccatgaagggcccaatagacataaacatgagtgaaattggaatggattacattcatgaactcttctccaaagacccaaccatcaagctcggaggtcactggaagccttctgattgcatgcctcggtggaaggtggcgatccttatccccttccggaaccgccacgagcacctcccagtcctgttcagacacctgcttcccatgctccagcgccagcgcttgcagtttgcattttatgtggttgaacaagttggtacccaaccctttaatcgagccatgcttttcaacgttggctttcaagaggcaatgaaagacttggattgggactgtttgatttttcatgatgtagatcacataccggaaagtgatcgcaactattatggatgtggacagatgccgaggcattttgcaaccaaattggataagtatatgtatctgcttccttataccgagttctttggcggagtgagtggcttaacagtggaacaatttcggaaaatcaatggctttcctaatgctttctggggttggggtggagaagatgacgacctctggaacagagtacagaatgcaggctattctgtgagccggccagagggtgacacaggaaagtacaagtccattcctcatcaccatcgaggagaagtccagtttcttggaaggtatgctctgctgaggaagtcaaaagaacggcaagggctggatggcctcaacaacctgaactactttgcaaacatcacatacgacgccttgtataaaaacataactgtcaacctgacacccgagctggctcaggtgaacgagtactgagaggagagaatgtacgtttgctttacccaccgccaccaagaaagcagtccgatgagatttttttttggaggggggagggtctacacagcaagagaacagaaatactgtgtctcatgaaggatcacagagttcagggggaaaatgtgacagcacacgcacaaacgccttcactggatcagccgctggaactgagggagtgagcttggggacttccttcgtcagcactggctttctgttttcacaagacagacgtctgtcccgctgctctctccccatctcctaccccacatcctgtcttagccgcagtctccagaacccatgatgaactgtgatctgccgtggtcctgccgtggtcctgccgtggagcctgtccctacacatgaccttggagcctcttggccttcagagcagaggcaaacccaccacagggcagctgcgttttaggaagagcaaatgaaactccacaccattcttctagatctctggtgttctctttggtttcatttttttaaaaaattaccttctttgggtggggattgagggtggaggggagggtgtttgggaaagataaatagacataaatatataacaatcacttcttgaagaagtataattgtaaataagccatgtaaaatgcctttttaaaatttaattttctagctggctccaattcaaattgaggatttatgtattaggccacttacttggttggcaagtgcaggaactcagttaaaatgcagttgaagaatgtcatctcccgaattgctgtcactttggcgagggagtggatatagggcatgtcacaaaagaacaaaataacccgacctttattgctgggagctggcttctgtccctttcttcccccccccacgagtcttgcccttgacttctgctctggattcactcttccctgtcggccgcgcatgtgctcatcccactctccgctaagcgggaggctgctgttagagcaggctgcttcctgcctaaagcaggcccttcggggctcgctgcacacacatctctggctctccaggcttcgtgttctgtcttttcatcagcatggcggggcggggggcggggggcgggggtgtgtatgggaatccctccccctcttactttttctcttgtggaacttggccacagtttctgaacaatgtgcctacattaccagctggcttcagtgattcctctgtgtccctttttggtttctggaaagattctttgtcaacattagtaactgatacatagaaccaaggagcactcaaatagggagccaggagccagggagctggtgacacttgtgtgctgtggggcagctgggatccaggtaagaccggattgaagctttgaaattagactaacaaagctccagacagcaagagcccaggtgcactgctcacacccccacctgcattttgaagtcatattattttttgttttgttttttaagacggtctggctctgtcgcctaagctggagtgtggtggcacgatcacagctcactgcagcctccatctcctaggctcaagccattttcccacctcagcctcccgagtagctgggactacaggtgcacaccaccacacctggctaattttttgtatttttagtagagacaggggtttcttccatgttgcccaggctggtctcgaactcctggactcaagcaatccgcccaccttgacttcccaaagtgctgggattatgggcgggtgtgagccattgcgcccagccttgaagtcatgttctaaattgtatttgaatttgtgcctctttgtttttccccaaaccaaagccctcaaattgtagtctctgtcggcttctgcagaattctggaaaatgccagttttcctcccccgcccttgttttccataaaacatatttatatattgtgatgaggagtactttctgaagagtacttcgtatttttttttaattgccttgtttgccttcaacttccttgattttcatagtttacatgggtgtgtgtaggggtgtgtgtgtgtatgtgtgtgggttagggcttttttcgttgcatgtgatggttctgtggacatatgatccccacaaactgtgggagtgattggccaggccttgttttgtttgtttgtttgtttgtgtttttgttcttttgaagaatagagtggtatttagaaaataaattgcattgcaaagctcttatcggctcatatgagagagcaggttcctgcccttgaaaatgccggtaagctatagcatatgttttttaagacttaagcatttcatgctttaaaataccttcacaagtgaacattacacacagaagttcatttggttttcctttgttttatggtgcatatagcaataaagacccccctccaccctgcaacccccatcccccaccgggcctttgtccctgccttggcttttctccccttctcattctcctctcccctttcctcactgaaggctgtgagttgctttcaatgtgacaacactatgatgtcatttggaaggatttgccaggacagactgattctgagtcctgggtgccgtatgtgtatgcggcagtgttgtcaggcgatcttgtttgaagctctatgttgccataattaccatcaagtacacactgttggcaaaaggctaacacctgactttagaaaatgctgatttgagaacaaaaggaaaggtcttttttcactgcttaaagtggggtcactttgatacctttgcggtcatgtctgtgtctgatgagtgtagaatctctggatgtgcactgtcagtcatgtgtccaccaggcctcgaatatcatatgggaaatgtcatagttaaaaacgtacagccaggcccgtgtgctgttaatagtgtgaaattgtcatgttaaaaaaaaaaacaggaaccaaatgtgaccttgtgcatatattggtagctgaaaatcttcaaggctactgatgggtggccccttaatcttgtctttgattgctgtgtgcagggaaaggtgtccccgtttgttcatgctgttttggggggtgggggggtatttgcaagaatactcattttgacataataggtcctcttgtcagagatcctctaccacagacattaatagctgagcaggagccacatggattgattgtatccactcaccattgacgatggcattgagcgtagctagcttatttccatcactacgtgtttttgagcttgctcttacgttttaagaggtgccaggggtacatttttgcactgaaatctaaagatgttttaaaaaacacttttcacaaaaatagtcctttgtcattacattatttactcatgtgtttgtacatttttgtatgttaatttatgaatgattttttcagtaaaaaatacatattcaagaacc

SEQ ID NO: 46 - DNA, 2143 bp, Homo sapiens
ggaagttttccggcggctaccgggaagtcgctgaagacagagcgatggtagttctggaggcctcgctccggggccgacccgaggccacagtgcctccgcggtagaccggacttgggtgacgggctccgggctcccgaggtgaagagcatcgggggctgagggatggaagggtctaagacgtccaacaacagcaccatgcaggtgagcttcgtgtgccagcgctgcagccagcccctgaaactggacacgagtttcaagatcctggaccgtgtcaccatccaggaactcacagctccattacttaccacagcccaggcgaaaccaggagagacccaggaggaagagactaactcaggagaggagccatttattgaaactcctcgccaggatggtgtctctcgcagattcatccccccagccaggatgatgtccacagaaagtgccaacagcttcactctgattggggaggcatctgatggcggcaccatggagaacctcagccgaagactgaaggtcactggggacctttttgacatcatgtcgggccagacagatgtggatcacccactctgtgaggaatgcacagatactcttttagaccagctggacactcagctcaacgtcactgaaaatgagtgtcagaactacaaacgctgtttggagatcttagagcaaatgaatgaggatgacagtgaacagttacagatggagctaaaggagctggcactagaggaggagaggctgatccaggagctggaagacgtggaaaagaaccgcaagatagtggcagaaaatctcgagaaggtccaggctgaggctgagagactggatcaggaggaagctcagtatcagagagaatacagtgaatttaaacgacagcagctggagctggatgatgagctgaagagtgttgaaaaccagatgcgttatgcccagacgcagctggataagctgaagaaaaccaacgtctttaatgcaaccttccacatctggcacagtggacagtttggcacaatcaataacttcaggctgggtcgcctgcccagtgttcccgtggaatggaatgagattaatgctgcttggggccagactgtgttgctgctccatgctctggccaataagatgggtctgaaatttcagagataccgacttgttccttacggaaaccattcatatctggagtctctgacagacaaatctaaggagctgccgttatactgttctggggggttgcggtttttctgggacaacaagtttgaccatgcaatggtggctttcctggactgtgtgcagcagttcaaagaagaggttgagaaaggcgagacacgtttttgtcttccctacaggatggatgtggagaaaggcaagattgaagacacaggaggcagtggcggctcctattccatcaaaacccagtttaactctgaggagcagtggacaaaagctctcaagttcatgctgacgaatcttaagtggggtcttgcttgggtgtcctcacaattttataacaaatgacttttttccttagggggaggtttgccttaaaggcttttaattttgttttgtttgcaaacatgttttaaattaaattcgggtaatattaaacagtacatgtttacaataccaaaaaagaaaaaatccacaaaagccactttattttaaaatatcatgtgacagatactttccagagctacaacatgccatctatagttgccagccctggtcagttttgattcttaaccccatggactcctttccctttcttctctgaaaaaaactaatttaaatttgcttttcttttttttaactgagttgaattgagattgatgtgttttcactggatttttatctctctcaacttcctgcacttaacaatatgaaatagaaacttttgtctttactgagatgaggatatgtttgagatgcacagttggataatgtgggaaaatgacatctaagctttacctggtcaccatgtgatgtgatcagatgcttgaaatttaacacttttcacttggttcttatactgaatgccgactctgctctgtgttagagatatgaaatggtgtttgatactgtttgagacattatggagagatttaattatttgtaataaaagatttgctgcagtctgaaaactgcc

SEQ ID NO: 47 - DNA, 3969 bp, Homo sapiens
gagaaagaaagagagaaaaagaaggaaagggagagggagacggctggagcccgaggacgagcgcggagccgcggaccgagcggggggcgggagacaggaaggagggaggcgagcagagggaaggggaagaggtcggggagcgagggcgggagcggtcgcggtcgcgatcgagcaagcaagcgggcgagaggacgccctcccctggcctccagtgcgccgcttccctcgccgccgccccgccagcatgcccggcgtggcccgcctgccgctgctgctcgggctgctgctgctcccgcgtcccggccggccgctggacttggccgactacacctatgacctggcggaggaggacgactcggagcccctcaactacaaagacccctgcaaggcggctgcctttcttggggacattgccctggacgaagaggacctgagggccttccaggtacagcaggctgtggatctcagacggcacacagctcgtaagtcctccatcaaagctgcagttccaggaaacacttctacccccagctgccagagcaccaacgggcagcctcagaggggagcctgtgggagatggagaggtagatcccgtagccggcgggcggcgacgtcccgaccagagcgtgtgtggcccgatggggtcatcccctttgtcattgggggaaacttcactggtagccagagggcagtcttccggcaggccatgaggcactgggagaagcacacctgtgtcaccttcctggagcgcactgacgaggacagctatattgtgttcacctatcgaccttgcgggtgctgctcctacgtgggtcgccgcggcgggggcccccaggccatctccatcggcaagaactgtgacaagttcggcattgtggtccacgagctgggccacgtcgtcggcttctggcacgaacacactcggccagaccgggaccgccacgtttccatcgttcgtgagaacatccagccaggcgttctccactcttcactgctccttctcagctgtggctctagaaatggtgcttccttcccatgttcccttgagtcctccattcaccaggccctctgctggacaggactcttcctgagaccctccccattccccaggctccccttggctgctccccggaccctcagggcaggagtataacttcctgaagatggagcctcaggaggtggagtccctgggggagacctatgacttcgacagcatcatgcattacgctcggaacacattctccaggggcatcttcctggataccattgtccccaagtatgaggtgaacggggtgaaacctcccattggccaaaggacacggctcagcaagggggacattgcccaagcccgcaagctttacaagtgcccagcctgtggagagaccctgcaagacagcacaggcaacttctcctcccctgaataccccaatggctactctgctcacatgcactgcgtgtggcgcatctctgtcacacccggggagaagatcatcctgaacttcacgtccctggacctgtaccgcagccgcctgtgctggtacgactatgtggaggtccgagatggcttctggaggaaggcgcccctccgaggccgcttctgcgggtccaaactccctgagcctatcgtctccactgacagccgcctctgggttgaattccgcagcagcagcaattgggttggaaagggcttctttgcagtctacgaagccatctgcgggggtgatgtgaaaaaggactatggccacattcaatcgcccaactacccagacgattaccggcccagcaaagtctgcatctggcggatccaggtgtctgagggcttccacgtgggcctcacattccagtcctttgagattgagcgccacgacagctgtgcctacgactatctggaggtgcgcgacgggcacagtgagagcagcaccctcatcgggcgctactgtggctatgagaagcctgatgacatcaagagcacgtccagccgcctctggctcaagttcgtctctgacgggtccattaacaaagcgggctttgccgtcaactttttcaaagaggtggacgagtgctctcggcccaaccgcgggggctgtgagcagcggtgcctcaacaccctgggcagctacaagtgcagctgtgaccccgggtacgagctggccccagacaagcgccgctgtgaggctgcttgtggcggattcctcaccaagctcaacggctccatcaccagcccgggctggcccaaggagtacccccccaacaagaactgcatctggcagctggtggcccccacccagtaccgcatctccctgcagtttgacttctttgagacagagggcaatgatgtgtgcaagtacgacttcgtggaggtgcgcagtggactcacagctgactccaagctgcatggcaagttctgtggttctgagaagcccgaggtcatcacctcccagtacaacaacatgcgcgtggagttcaagtccgacaacaccgtgtccaaaaagggcttcaaggcccacttcttctcagacaaggacgagtgctccaaggataacggcggctgccagcaggactgcgtcaacacgttcggcagttatgagtgccaatgccgcagtggcttcgtcctccatgacaacaagcacgactgcaaagaagccggctgtgaccacaaggtgacatccaccagtggtaccatcaccagccccaactggcctgacaagtatcccagcaagaaggagtgcacgtgggccatctccagcacccccgggcaccgggtcaagctgaccttcatggagatggacatcgagtcccagcctgagtgtgcctacgaccacctagaggtgttcgacgggcgagacgccaaggcccccgtcctcggccgcttctgtgggagcaagaagcccgagcccgtcctggccacaggcagccgcatgttcctgcgcttctactcagataactcggtccagcgaaagggcttccaggcctcccacgccacagagtgcgggggccaggtacgggcagacgtgaagaccaaggacctttactcccacgcccagtttggcgacaacaactaccctgggggtgtggactgtgagtgggtcattgtggccgaggaaggctacggcgtggagctcgtgttccagacctttgaggtggaggaggagaccgactgcggctatgactacatggagctcttcgacggctacgacagcacagcccccaggctggggcgctactgtggctcagggcctcctgaggaggtgtactcggcgggagattctgtcctggtgaagttccactcggatgacaccatcaccaaaaaaggtttccacctgcgatacaccagcaccaagttccaggacacactccacagcaggaagtgaccactgcctgagcaggggcggggactggagcctgctgcccttggtcgcctagactggatagtgggggtgggcggaaggcaacgcaccatccctctcccccaggccccaggacctgcagggccaatggcctggtgagactgtccataggaggtgggggaactggactccggcataagccacttccccacaaacccccaccagcaaggggctggggccagggagcagagcttccacaagacatttcgaagtcatcattcctctcttagggggccctgcctggtggcaagagggaatgtcagcaggaccccatcgccatccctgtgtctctacacgctgtattgtgtatcaccgggggcattattttcattgtaatgttcatttcccacccctgctccagcctcgatttggttttattttgagcccccattccaccaccccagtttcctggggcacaagtgtctgtgcatgtcccccaggagccaccgtggggagccgatggggaggggatggagaaacaagacagggcttctctcaggcccagtggccggtcagccacaccagggcaccgcagccaataaaccgaaagtgttacagccaa

SEQ ID NO: 48 - DNA, 4660 bp, Homo sapiens
acttccttttcgtggcactataaagggtgctgcacggcgcttgcatctcttcgcctctcggagctggaaatgcagctattgagatcttcgaatgctgcggagctggaggcggaggcagctggggaggtccgagcgatgtgaccaggccgccatcgctcgtctcttcctctctcctgccgcctcctgtctcgaaaataacttttttagtctaaagaaagaaagacaaaagtagtcgtccgcccctcacgccctctcttcctctcagccttccgcccggtgaggaagcccggggtggctgctccgccgtcggggccgcgccgccgagccccagccgccccgggccgcccccgcacgccgcccccatgcatcccttctacacccgggccgccaccatgataggcgagatcgccgccgccgtgtccttcatctccaagtttctccgcaccaaggggctcacgagcgagcgacagctgcagaccttcagccagagcctgcaggagctgctggcagaacattataaacatcactggttcccagaaaagccatgcaagggatcgggttaccgttgtattcgcatcaaccataaaatggatcctctgattggacaggcagcacagcggattggactgagcagtcaggagctgttcaggcttctcccaagtgaactcacactctgggttgacccctatgaagtgtcctacagaattggagaggatggctccatctgtgtgctgtatgaagcctcaccagcaggaggtagcactcaaaacagcaccaacgtgcaaatggtagacagccgaatcagctgtaaggaggaacttctcttgggcagaacgagcccttccaaaaactacaatatgatgactgtatcaggttaagatatagtctgtggatggatcatctgatgatgatggataaatttgatttttgctttgggtgggctcctcttggggatggattatggaatttaaaccatgtcacagctgtgaagatctggcacaagatagaatggtaaaaaaaaaaaaaattttaagtgacagtgccatagtttggacagtacctttcaatgattaattttaatagcctgtgagtccaagtaaatgatcactttatttgctagggagggaagtcctagggtggtttcagtttctcccagacatacctaaatttttacatcaatccttttaaagaaaatctgtatttcaaagaatctttctctgcagtaaatctcgcaggggaatttgcactattacacttgaaagttgttattgttaaccttttcggcagcttttaataggaaagttaaacgttttaaacatggtagtactggaaattttacaagacttttacctagcacttaaatatgtataaatgtacataaagacaaactagtaagcatgacctggggaaatggtcagaccttgtattgtgtttttggccttgaaagtagcaagtgaccagaatctgccatggcaacaggctttaaaaaagacccttaaaaagacactgtctcaactgtggtgttagcaccagccagctctctgtacatttgctagcttgtagttttctaagactgagtaaacttcttatttttagaaagtggaggtctggtttgtaactttccttgtacttaattgggtaaaagtcttttccacaaaccaccatctattttgtgaactttgttagtcatcttttatttggtaaattatgaactggtgtaaatttgtacagttcatgtatattgattgtggcaaagttgtacagatttctatattttggatgagaaatttttcttctctctataataaatcgtttcttatcttggcattttaatcaatctcttgtcatgattatagaggtttagctaaaagtattttttcttagaagacaggttctataaactgaatctctgttgcacactggtcatgctggaaaaacatttgatgaggaatgaagatgctctgtatatacatgtttaggttttacaggaaacacaggagtagcatgttttaaaaatttctaaagtcaaaacatggacacattcacaggctaatgatctcatgaaataaggataagagaccacggtagcatctaccaaaaatgtgatactcaaaggattacatttcattgcttccctgttgaagtgaagatataaatgttccattctgacccacctttgaaaaacaattactttgccccatggattctttgttcaattagaaatttccccggggcaggtgacccatagtcttaaagaacaggctaaacaccacagagagattggttgctttttgcttttcatcacctgcaagatgtacataaaaatcacataagctggaattcaacaaaaggtatgtttatgaacttttattctcaaaagttgaaatgctgactttctcgattcctcattttcagacttttatttcagataaatactaaaaacctaagtgaaccttgataatgctgtagtgtagattacttcactaccccatataatagaaggacttgctgtttagttgtagaggataacagcgtttttcagtggaaattgaaagtggaaaaattgaattttgctctacacagttaacatatagtggcctttttttggtatatatgtaaacatgttgacactggaaatacgcagtctgaaataaaattagtaattacttgaaattagtaatctcaaataacttttaagaagttatttctacacccaggaataaattattctgattttgtagacaacacaggaataggccactgaatatgcaggtatttagagtacaaatgtctgtggatattattggcacaccattctcgagagttagaattcgtagacccgcaacacatggactacccttgccaattgttatggttttatttttaaacctattctgtgaaaaagctcctcggtatttcaaacttgaattacaataaaaacaccaggtagggttgtttttaaatgggtctcaccccagtgctgactactgttgtttaccaactacatttcatctggtaactccattgaaactaagtacctcaaccattttttttttttatcataaagccttttttcaaatggaaagttgtttttgaagatcttgacatcagactttttcaatctttgaaaatgatggaaacagttaataaaaatgtttattttagaattcaggtgatgtctggcttgtgaggagctgtttataagtttgtctttgaaaaaggcttgcacacatcactctgagaccagctgtttcctgtgactttaaccttaccttccccagacaattgagctgaacctgtatctgcggtacagtagctgtttgtgatgtatttcttgttcactgtttctggggaatgttttgaaatattttattataaatccttttaagataggatgactactttcaaaattattgttgcctttggcaccaggaattcatagttgtgattggcagtaagtttgaggagtgttactttctaagttttaacaggtagttttgaaattatttccttttttccaaatttaagtagtgcctccctctgtaatgttgaaacaaggcttcaagtggattgtatagcaagagttaccctggttcatgcaggataatgcggctgttatctttgtcatctggaatgggaatctcatgtctttatccttatgtgcaatatttctataataatagactggaaaggccaccagaaagtggctttcaggtacattgcacaaatagtttccttaagtcattataactcacacattgcaagtaattaattttgttttgtataggtgttgcagtttatgaaattggccttcaagttaaaaggaaggaagccgtattcccgatggctagtgtttaatgactacaggtttccaggctccctttaatcttgggagcaaataaatctactattggacttctccctgcgtgacttttaacatttctgatactctctcttcttcctctttacagaagagaggtatgataactgaagttgtactttgcatattgaagtttaaagatacttcctctccccttttcacccctatttcaaatgatgtgataaaatcctcttgataggctatatggagaacatttgtcaatagttttatctatgcatggaagtcttcaaaaagtatatcttggattgtctaaaactgaatagatttcttatttatctgaaggtatacagactgccaacattttagacttatctctcagtctctgccactgaacttttatatatggctgctatcaaaatataaccggtttattttcatatttggaactaatataacagtatcacaaaatcttttacagtaagatagtttgtaataccagccgacccagctgcttaactgagtccttaaatcatttaatatatgggactgtaaatagagaaatctgtacattatgagatctgatttctggttatgcctatagatctttattttctttatccctatagatcattttcttctgatgttaagtgttatatttttgaaatgctcctaaacaagtaagccttagattgtattaatcctgaggattgataccatttcctcaacactttgtggagtatgattgacaccagtttttttttgactgcaggtttaacttggcttatcacttttcgtattgctcagtatgtccaagatagg

SEQ ID NO: 49 - DNA, 3633 bp, Homo sapiens
aagatggctgccctaatgtacacttgggaccttgcctggcgcctcttccgggcttggcagcgggcggggtccattgagtaaagccttgcgtgcctgcgcccgcgacggaggcgcgcttcaaagcgcaggcgcggggagggggtgggggaggagggaaagcggcgagtaagatggaagatgaggaggtcgctgagagctgggaagaggcggcagacagcggggaaatagacagacggttggaaaaaaaactgaagatcacacaaaaagagagcaggaaatccaaatctcctcccaaagtgcccattgtgattcaggacgatagccttcccgcggggccccctccacagatccgcatcctcaagaggcccaccagcaacggtgtggtcagcagccccaactccaccagcaggcccacccttccagtcaagtccctagcacagcgagaggccgagtacgccgaggcccggaagcggatcctgggcagcgccagccccgaggaggagcaggagaaacccatcctcgacaggccaaccaggatctcccaacccgaagacagcaggcagcccaataatgtgatcagacagcctttgggtcctgatgggtctcaaggcttcaaacagcgcagataaatgcaggcaagaaaagatgccgccgttgctgccgtcaccgcctcctgggtcgtccgccacgggttgcactgccgtggcagacagctggacttgagcagagggaacgacctgacttacttgcactgtgatcccccttgctccgcccactgtgaccttgaaccccatgcactgtgacctccccccttctcccccttcccactgtgattggcacatcgacaagggctgtcccaagtcaatggaaagggaaagggtgggggttaggggaaggttggggggacccagcaaggactcagagagtcagacagtgccacttggccacttggggtaaagccagtgccagcaataacagtttatcatgctcattaatttgggatttcaaaacacaaatgaaaactcacacccacccacccccaagtgcatgtctccatcacttaaaaagtaagttccatttgaaaatatcctttcttttttttttcttcctatttttgtttgtttatacaaatatctgatttgcaagaaaaagtgcatgggaggggttttagtggtttaatgaatttttaattaagaaagggtagtttggtagtctacttaaaaatgtttctgggaaattcactagaaacattaaccaataggattttggtgagcttagcttctgtattcctactgccgcccagaaaaggggcagggctctgcagccgccaggacagacgagcaccccatgcctatacctccctccccgagctaagtcccagggcatctgggccttgcctggagactgggctagctctgtaggctcggagagcctggggagggtgccaaccccacctctagtattttgggagatagggaaagtgaaccgacttccccttcccatacccctcagggtggttccctaccagccaggcttactacttctagaagaaagcagagtgccagggagtgagattgcatccctgggcttagaagtgacggagagaagacttgtttagtattttgccatcagcacaaggaaaaccaggagagagtctgcctccaggactctgagccttctgcctcgtatgttcagaaggtggataggtcttcccactccagcatggcttgaactcttaggggtctgcagtgctccatctccattggtggccccagctcagtaactatacctggtacatttcctgtgtgcaatcagtaccttgaaggcagaacattctgaataaagttggaaaaagaacagctttgctttgcaaagattgatgacagactggttcctcagaggcctaggctacccgtcacccctttttccagagcgagggcctggaatgaaggcagtttatcctctgtccctggagcctggggtttgctttggctccttgaggtggaagagactaagagggcagctgcccagagcagctgtgtgtacctggctcctctcaggcttcctgatcccttccgttgcactgcgccttatccctcagccagccagacagcctccctgctcctgaccagcagatacgtttcggagtggttggtgtggtttttgtgatgagggcagcacgtggtggccaaggtggcaagctgagtctcacaggctcactccctcgttggttccctgtgggaatggtaggccaggcccagtaagccatgccccaacacgtcctctcctccggaggaagggccagctgccagctgagtcagcagctagtccatagcacagccttataactgtaaagccaggcattgcccatgagcagagctggaaccagagcttcagtcagtaagagggaggattaccttcaggagaaggcaaggaagaaaactggctgctatctttatagttccactgccctaaccaagtgtccacattctaaatgtgtagtgtccatcccttatgtaatagtggtttcccgcccaaagtgagactttccttttaattggagaagggtatagaggtagtccaggtgggaacgccagaagtgctgattgcccagccattgggaccacctgttcttgccccactaccctctagtgggaggccaaagtaaaggctggctggtgggtgtctgtggattgaggatgtggcagggactggtcctcccacctccctctggccaaagatgggctttgcccgctgtgtgcctgtcaccacccaccagcagtcatgccctgggcttcccaaatggagaggtagcaggcaacgtttttaaaaagaaagaaaacaggaaactgtattgtgtcgggggaggcgggagggagatgaggaaacggtttggattttgtgtgtgggagggtattttttgggggtagttgtctgtaactttcctaagtgctttttttccttttcttttttaaagtaagttgcaggctttggcttggaaaaccccagggggatggggggcagaaacctgaggctgctgcccctttatctgccttcacggtactgtccccttcccccagctcctccctgaccccatgggccaggcctcagaccttccagctaaccgcttcccatgagccactactctgatgtcagcctataaccaaaggagctggggggtccaggcctggtgaccaacctttctcagcccactcaatcagggtgctccccacctgcaggcaggaggcaacaccctatctgctaccatcagccccttccagagcccatctgccccgcccagccctgccctgcccagccataccctgctctgccccatctgggggtgccctgctcagggatgggctggcagggctgtacccagcctccctggtaagcagagactcaagaaacctctggggtcctgttttctggtcgtgtgatcccaggggtgcacatgggccccttgggtgtctgaacagaagggcatgggagggagggctgcacccctgcagtcttactctgctggtgtagcgggcagctgcccactcccaccccaccctgcaccgcgggctcctgagtcggcagattaagcattttataaattgtattttaaatacatgttttaaacttgtc

SEQ ID NO: 50 - DNA, 3409 bp, Homo sapiens
gattggtcgggaggccgccggcgaggcggatgagggcggggtgcggacccgcttccggttgggcggtgcttgcgcgcgtgagctgagccggtgggtgagcggcggccacggcatcctgtgctgtgggggctacgaggaaagatctaattatcatggacctgcgacagtttcttatgtgcctgtccctgtgcacagcctttgccttgagcaaacccacagaaaagaaggaccgtgtacatcatgagcctcagctcagtgacaaggttcacaatgatgctcagagttttgattatgaccatgatgccttcttgggtgctgaagaagcaaagacctttgatcagctgacaccagaagagagcaaggaaaggcttggaatgattgtagataaaatagacgcggataaagatgggtttgtgacggagggggagctgaaatcctggattaagcacgcccagaagaaatacatatatgacaatgttgaaaaccaatggcaggagtttgatatgaatcaagacggcttaatctcctgggatgagtacagaaacgtgacttatggcacttacctggatgatccagatcctgatgatggatttaactataaacagatgatggttagagatgagcggaggtttaaaatggcagacaaggatggagacctcattgccaccaaggaggagttcacagctttcctgcaccctgaggagtatgactacatgaaagatatagtagtacaggaaacaatggaagatatagataagaatgctgatggtttcattgatctagaagagtatattggtgacatgtacagccatgatgggaatactgatgagccagaatgggtaaagacagagcgagagcagtttgttgagtttcgggataagaaccgtgatgggaagatggacaaggaagagaccaaagactggatccttccctcagactatgatcatgcagaggcagaagccaggcacctggtctatgaatcagaccaaaacaaggatggcaagcttaccaaggaggagatcgttgacaagtatgacttatttgttggcagccaggccacagattttggggaggccttagtacggcatgatgagttctgagctacggaggaaccctcatttcctcaaaagtaatttatttttacagcttctggtttcacatgaaattgtttgcgctactgagactgttactacaaactttttaagacatgaaaaggcgtaatgaaaaccatcccgtccccattcctcctcctctctgagggactggagggaagccgtgcttctgaggaacaactctaattagtacacttgtgtttgtagatttacactttgtattatgtattaacatggcgtgtttatttttgtatttttctctggttgggagtatgatatgaaggatcaagatcctcaactcacacatgtagacaaacattagctctttactctttctcaaccccttttatgattttaataattctcacttaactaattttgtaagcctgagatcaataagaaatgttcaggagagaggaaagaaaaaaaatatatgctccacaatttatatttagagagagaacacttagtcttgcctgtcaaaaagtccaacatttcataggtagtaggggccacatattacattcagttgctataggtccagcaactgaacctgccattacctgggcaaggaaagatccctttgctctaggaaagcttggcccaaattgattttcttctttttccccctgtaggactgactgttggctaattttgtcaagcacagctgtggtgggaagagttagggccagtgtcttgaaaatcaatcaagtagtgaatgtgatctctttgcagagctatagatagaaacagctggaaaactaaaggaaaaatacaagtgttttcggggcatacattttttttctgggtgtgcatctgttgaaatgctcaagacttaattatttgccttttgaaatcactgtaaatgcccccatccggttcctcttcttcccaggtgtgccaaggaattaatcttggtttcactacaattaaaattcactcctttccaatcatgtcattgaaagtgcctttaacgaaagaaatggtcactgaatgggaattctcttaagaaaccctgagattaaaaaaagactatttggataacttataggaaagcctagaacctcccagtagagtggggatttttttcttcttccctttctcttttggacaatagttaaattagcagtattagttatgagtttggttgcagtgttcttatcttgtgggctgatttccaaaaaccacatgctgctgaatttaccagggatcctcatacctcacaatgcaaaccacttactaccaggcctttttctgtgtccactggagagcttgagctcacactcaaagatcagaggacctacagagagggctctttggtttgaggaccatggcttacctttcctgcctttgacccatcacaccccatttcctcctctttccctctccccgctgccaaaaaaaaaaaaaaaggaaacgtttatcatgaatcaacagggtttcagtccttatcaaagagagatgtggaaagagctaaagaaaccaccctttgttcccaactccactttacccatattttatgcaacacaaacactgtccttttgggtccctttcttacagatggacctcttgagaagaattatcgtattccacgtttttagccctcaggttaccaagataaatatatgtatatataacctttattattgctatatctttgtggataatacattcaggtggtgctgggtgatttattataatctgaacctaggtatatcctttggtcttccacagtcatgttgaggtgggctccctggtatggtaaaaagccaggtataatgtaacttcaccccagcctttgtactaagctcttgatagtggatatactcttttaagtttagccccaatatagggtaatggaaatttcctgccctctgggttccccatttttactattaagaagaccagtgataatttaataatgccaccaactctggcttagttaagtgagagtgtgaactgtgtggcaagagagcctcacacctcactaggtgcagagagcccaggccttatgttaaaatcatgcacttgaaaagcaaaccttaatctgcaaagacagcagcaagcattatacggtcatcttgaatgatccctttgaaattttttttttgtttgtttgtttaaatcaagcctgaggctggtgaacagtagctacacacccatattgtgtgttctgtgaatgctagctctcttgaatttggatattggttattttttatagagtgtaaaccaagttttatattctgcaatgcgaacaggtacctatctgtttctaaataaaactgtttacattcatt

SEQ ID NO: 51 - DNA, 4895 bp, Homo sapiens
cacacacacacacacacacacacacaccccaacacacacacacacaccccaacacacacacacacacacacacacacacacacacacacacacacacacacacacacagcgggatggccgagcgccgcacgcgtagcacgccgggactagctatccagcctcccagcagcctctgcgacgggcgcggtgcgtaagtacctcgccggtggtggccgttctccgtaagatggcggaccggcggcggcagcgcgcttcgcaagacaccgaggacgaggaatctggtgcttcgggctccgacagcggcggctccccgttgcggggaggcgggagctgcagcggtagcgccggaggcggcggcagcggctctctgccttcacagcgcggaggccgaaccggggcccttcatctgcggcgggtggagagcgggggcgccaagagtgctgaggagtcggagtgtgagagtgaagatggcattgaaggtgatgctgttctctcggattatgaaagtgcagaagactcggaaggtgaagaaggtgaatacagtgaagaggaaaactccaaagtggagctgaaatcagaagctaatgatgctgttaattcttcaacaaaagaagagaagggagaagaaaagcctgacaccaaaagcactgtgactggagagaggcaaagtggggacggacaggagagcacagagcctgtggagaacaaagtgggtaaaaagggccctaagcatttggatgatgatgaagatcggaagaatccagcatacatacctcggaaagggctcttctttgagcatgatcttcgagggcaaactcaggaggaggaagtcagacccaaggggcgtcagcgaaagctatggaaggatgagggtcgctgggagcatgacaagttccgggaagatgagcaggccccaaagtcccgacaggagctcattgctctttatggttatgacattcgctcagctcataatcctgatgacatcaaacctcgaagaatccggaaaccccgatatgggagtcctccacaaagagatccaaactggaacggtgagcggctaaacaagtctcatcgccaccagggtcttgggggcaccctaccaccaaggacatttattaacaggaatgctgcaggtaccggccgtatgtctgcacccaggaattattctcgatctgggggcttcaaggaaggtcgtgctggttttaggcctgtggaagctggtgggcagcatggtggccggtctggtgagactgttaagcatgagattagttaccggtcacggcgcctagagcagacttctgtgagggatccatctccagaagcagatgctccagtgcttggcagtcctgagaaggaagaggcagcctcagagccaccagctgctgctcctgatgctgcaccaccaccccctgataggcccattgagaagaaatcctattcccgggcaagaagaactcgaaccaaagttggagatgcagtcaagcttgcagaggaggtgccccctcctcctgaaggactgattccagcacctccagtcccagaaaccaccccaactccacctactaagactgggacctgggaagctccggtggattctagtacaagtggacttgagcaagatgtggcacaactaaatatagcagaacagaattggagtccggggcagccttctttcctgcaaccacgggaacttcgaggtatgcccaaccatatacacatgggagcaggacctccacctcagtttaaccggatggaagaaatgggtgtccagggtggtcgagccaaacgctattcatcccagcggcaaagacctgtgccagagccccccgcccctccagtgcatatcagtatcatggagggacattactatgatccactgcagttccagggaccaatctatacccatggtgacagccctgccccgctgcctccacagggcatgcttgtgcagccaggaatgaaccttccccacccaggtttacatccccaccagacaccagctcctctgcccaatccaggcctctatcccccaccagtgtccatgtctccaggacagccaccacctcagcagttgcttgctcctacttacttttctgctccaggcgtcatgaactttggtaatcccagttacccttatgctccaggggcactgcctcccccaccaccgcctcatctgtatcctaatacacaggccccatcacaggtatatggaggagtgacctactataaccccgcccagcagcaggtgcagccaaagccctccccaccccggaggactccccagccagtcaccatcaagccccctccacctgaggttgtaagcaggggttccagttaatacaagtttctgaatattttaaatcttaacatcatataaaagtaagtgcacaacttactgtgaatattgttaaaactaatgctcacacttgcttaataaacaaaaatcacttaattaatgctttttttttttttttttttttttttttttttgagacggcgtctcagtctgttatccaggctggagtgcagtggtgcaatctcggctcactgcaacctccatctcctgagttcaagcgattctcttgcctcagcctcctaagtagctaggattacaggcacgcaccaccacacctggctaatttttgtatttttagtgggaatggggtttcaccatattggccaggctggtcttgaactcctgacctcaggtgatccacctgccttggcctcccaaagtgttgggattacaggtgtgagccaccccacccagcctctgattaatgctttaagttataataatcatgggatatctcaggaggcttaaaggagtcctgaaatttgccagtttgtttgtttggcaagtgtattgggcagggttgaagtagaaacgattgttaacatgacagttttcaattgggaagctacaaggaaaaaatacaggaaggcagtcaaggaaaagggaaatctaaatttgagatgttatagcagaaaaaaccagttctaaagatcatagaggagaaggactgggggttttgttgcttttgtttaaggacattacttaaaacacattatttagaagtgtggctttttgaaaacagcttgtgaatgcccagaaggcccactaacactttggtggttcttccctttttccaacccctgtcagagcagcagaggtgagaactcagaagagaaatacagctggctatctactaccagaagggcttcaaagatatagggtgtggctcctaccagcaaacagctgaaagaggaggacccctgccttcctctgaggacaggctctagagagagggagaaacaagtggacctcgtcccatcttcactcttcacttgagttggctgtgttcgggggagcagagagagccagacagccccaagcttctgagtctagatacagaagcccatgtcttctgctgttcttcacttctgggaaattgaagtgtcttctgttcccaaggaagctccttcctgtttgttttgttttctaagatgttcatttttaaagcctggcttcttatccttaatattattttaattttttctctttgtttctgtttcttgctctctctccctgcctttaaatgaaacaagtctagtcttctggttttctagcccctctggattcccttttgactcttccgtgcatcccagataatggagaatgtatcagccagccttccccaccaagtctaaaaagacctggcctttcacttttagttggcatttgttatcctcttgtatacttgtattcccttaactctaaccctgtggaagcatggctgtctgcacagagggtcccattgtgcagaaaagctcagagtaggtgggtaggagcccttctctttgacttaggtttttaggagtctgagcatccatcaatacctgtactatgatgggcttctgttctctgctgagggccaataccctactgtggggagagatggcacaccagatgcttttgtgagaaagggatggtggagtgagagcctttgcctttaggggtgtgtattcacatagtcctcagggctcagtcttttgaggtaagtggaattagagggccttgcttctcttctttccattcttcttgctacaccccttttccagttgctgtggaccaatgcatctctttaaaggcaaatattatccagcaagcagtctaccctgtcctttgcaattgctcttctccacgtctttcctgctacaagtgttttagatgttactaccttattttccccgaattctatttttgtccttgcagacagaatataaaaactcctgggcttaaggcctaaggaagccagtcaccttctgggcaagggctcctatctttcctccctatccatggcactaaaccacttctctgctgcctctgtggaagagattcctattactgcagtacatacgtctgccaggggtaacctggccactgtccctgtccttctacagaacctgagggcaaagatggtggctgtgtctctccccggtaatgtcactgtttttattccttccatctagcagctggcctaatcactctgagtcacaggtgtgggatggagagtggggagaggcacttaatctgtaacccccaaggaggaaataactaagagattcttctaggggtagctggtggttgtgccttttgtaggctgttccctttgccttaaacctgaagatgtctcctcaagcctgtgggcagcatgcccagattcccagaccttaagacactgtgagagttgtctctgttggtccactgtgtttagttgcaaggatttttccatgtgtggtggtgttttttgttactgttttaaagggtgcccatttgtgatcagcattgtgacttggagataataaaatttagactataaacttggctccct

SEQ ID NO: 52 - DNA, 1344 bp, Homo sapiens
gggaggagagaaaagccatggccgacaaggtcctgaaggagaagagaaagctgtttatccgttccatgggtgaaggtacaataaatggcttactggatgaattattacagacaagggtgctgaacaaggaagagatggagaaagtaaaacgtgaaaatgctacagttatggataagacccgagctttgattgactccgttattccgaaaggggcacaggcatgccaaatttgcatcacatacatttgtgaagaagacagttacctggcagggacgctgggactctcagcagatcaaacatctggaaattaccttaatatgcaagactctcaaggagtactttcttcctttccagctcctcaggcagtgcaggacaacccagctatgcccacatcctcaggctcagaagggaatgtcaagctttgctccctagaagaagctcaaaggatatggaaacaaaagtcggcagagatttatccaataatggacaagtcaagccgcacacgtcttgctctcattatctgcaatgaagaatttgacagtattcctagaagaactggagctgaggttgacatcacaggcatgacaatgctgctacaaaatctggggtacagcgtagatgtgaaaaaaaatctcactgcttcggacatgactacagagctggaggcatttgcacaccgcccagagcacaagacctctgacagcacgttcctggtgttcatgtctcatggtattcgggaaggcatttgtgggaagaaacactctgagcaagtcccagatatactacaactcaatgcaatctttaacatgttgaataccaagaactgcccaagtttgaaggacaaaccgaaggtgatcatcatccaggcctgccgtggtgacagccctggtgtggtgtggtttaaagattcagtaggagtttctggaaacctatctttaccaactacagaagagtttgaggatgatgctattaagaaagcccacatagagaaggattttatcgctttctgctcttccacaccagataatgtttcttggagacatcccacaatgggctctgtttttattggaagactcattgaacatatgcaagaatatgcctgttcctgtgatgtggaggaaattttccgcaaggttcgattttcatttgagcagccagatggtagagcgcagatgcccaccactgaaagagtgactttgacaagatgtttctacctcttcccaggacattaaaataaggaaactgtatgaatgtctgtgggcaggaagtgaagagatccttctgtaaaggtttttggaattatgtctgctgaataataaacttttttgaaataataaatctggt

SEQ ID NO: 53 - DNA, 1777 bp, Homo sapiens
ggttgacggaagtgctctatcttgttgccggaagtgggaagagagaaaggttgtgatggcggctatagctgcatccgaggtgctggtggacagcgcggaggaggggtccctcgctgcggcggcggagctggccgctcagaagcgcgaacagagactgcgcaaattccgggagctgcacctgatgcggaatgaagctcgtaaattaaatcaccaggaagttgtggaagaagataaaagactaaaattacctgcaaattgggaagccaaaaaagctcgtttggagtgggaactaaaggaagaggaaaagaaaaaggaatgtgcggcaagaggagaagactatgagaaagtgaagttgctggagatcagtgcagaagatgcagaaagatgggagaggaaaaagaagaggaaaaaccctgatctgggattttcagattatgctgctgcccagttacgccagtatcatcggttgaccaagcagatcaaacctgacatggaaacatatgagagactgagagaaaaacatggagaagagtttttcccaacatccaatagtcttcttcatggaacacatgtgccttccacagaggaaattgacaggatggtcatagatctggaaaaacagattgaaaaacgagacaaatatagccggagacgtccttataatgatgatgcagatatcgactacattaatgaaaggaatgccaaattcaacaagaaagctgaaagattctatgggaaatacacagctgaaattaaacagaatttggaaagaggaacagctgtctaatcccttcaagaactgtttatagaagcttgagaatggggtaaaaatttctgctagcaaaatcaagttctttttgaaattttatcagtaatccagaatttagtagtccatgccttctcactcagcatttagaaataaaaatgtggtttcttaaacgtatatcctttcatgtatatttccacatttttgtgcttggatataagatgtatttcttgtagtgaagttgttttgtaatctactttgtatacattctaattatattatttttctatgtattttaaatgtatatggctgtttaatctttgaagcattttgggcttaagattgccagcagcacacatcagatgcagtcattgttgctatcagtgtggaatttgatagagtctagactcgggccacttggagttgtgtactccaaagctaaggacagtgatgaggaagatggcagtggccaccggaggactggagcagtccctcctcatggcggcctgtgaccaaggtcggggaggagtggagctatccttccatgatctgatcatgtacagttccctttttaaaaagcaataaatgcttgggattagaatttctaacatttttagtctatcatttaaaacaaacatttgtatatatacatttgtttatatacatacatgcttccattctacaaacactgaaagaatattttattatgggaaattccatacacccaatacccctggtgagtcccatatacccagtaccctgttcaacaatcattaactcatggccagtcctgcttcatctttatttccatttactttcttcatgactcttattttgacgcatatactagatatataatttcatctataattattttagtatgtatctctgaaagataaagacttaaatgaccacaatactattatcactgcaatagatttatttttataaaactccagagggaaaggttgttattttttctctatgttgaattaaatgctaaatatctaa

SEQ ID NO: 54 - DNA, 3110 bp, Homo sapiens
atcgtccgagccccacctccctcctcttcgcccccgcacgccgaaaacaggggcctctcacgtgacccctgcgcgctcccgcgggggagcgtagtctcggaggcggcgccgcaggggattgaggggttgactgagcgttgcgagccttagctttctcccgaacgccagcgctgaggacacgatgtcgcggctctcccgctcactgctttgggccgccacctgcctgggcgtgctctgcgtgctgtccgcggacaagaacacgacccagcacccgaacgtgacgactttagcgcccatctccaacgtaacctcggcgccggtgacgtccctcccgctggtcaccactccggcaccagaaacctgtgaaggtcgaaacagctgcgtttcctgttttaatgttagcgttgttaatactacctgcttttggatagaatgtaaagatgagagctattgttcacataactcaacagttagtgattgtcaagtggggaacacgacagacttctgttccgtttccacggccactccagtgccaacagccaattctacagctaaacccacagttcagccctccccttctacaacttccaagacagttactacatcaggtacaacaaataacactgtgactccaacctcacaacctgtgcgaaagtctacctttgatgcagccagtttcattggaggaattgtcctggtcttgggtgtgcaggctgtaattttctttctttataaattctgcaaatctaaagaacgaaattaccacactctgtaaacagacccattgaattaataaggactggtgattcatttgtgtaactcactgaagccaaaatactatcttttaagatgtcccacatggaagacgctattccaggatctttaaatttccatggatgcatataggatgtttgggagcatcatccgtgaagaaaaaatcaattaaatcattgtgttcaacaggaatatttaaaatattctgcatgaatcctgtggctgtcttattttaaatagctgctgctgtgggattatattttttttccttaacatgccaaatataactttctgaaagtgatggaaaatgttgtcttgtgcagacaacatcatggctcttggcagtttaaatttagtaattttaatttagtgaacagaattgagaagaacgtgccaaatgagaatcaattaggtggatttttggctgtcatttcaaaagtggaataaatttattaatttagtagtactaaatggtatccttagattaaaattttgtgcttgataacagctgttttttctacattagaaataagatgccacacaaggaactacattccagatttaaagaaatgaaaggataccattagtgtgtataacagattattgttcatacttgtaaagcatcttatgtcattgagaatataaagaacagtgccttagaagacagtgaaaggtaagctctagcttaatgtctatgatttgttctttgacattaaggaaggtaaggattggtcagaggatgtaacttgatgtgagcagtagtaaacctgttttagatatcatactgttaatattttattgaaaatttatttcagagcggagaaacttaagctaaagtctgttatacagaattgaaagccttcgtatcttgaacctcccaacatttttcttatggctgttgaaaagtatagagctaaattgatttaattacactttcctttgtactttaaaaaaaagtatgctagcactattgtaccttgaaaggatttccaccagactgtcttgagtagtgacttctttggtgaggcaagaaggatatacattattttagaatcatttactatttaaatgagacaatcatattattttagaatcatttattttaaatgagacaatcattttaagttttaagataacagaagtgaccaatgtaatttcacaacacctaaggattttttggttgatcaggttactgtagatttttactgattgtcctggatgaatagactgtgctttttctttttctctcccttccttcttggtttcccatagtataataagcatgcatactttaacttctatagttttctcctttagagggtcgtcttcagttttagaggtttacttctcccttgcctttgactcattggactagtgcagaggctttaagtagtttaaaatgggcttttgcttttctaggtcattaacgttttttatttagtttctttagccaatagtggctgagtttcgcacttgattttcaatattttatagtaagaaatgacaaactgctttgtttcatttcataaacaaactctgcatttagataactattaaaggttgttaagatgaagatttactgtttctttgttactcgttggtacagctgtttgttttacttgcacatttgtacatatacttaatgttttcaagtgccttaattgtttaaaatctctggcttcaaagtttcttggggaaaggtcggtttacctcacattttttgtttccattagtaatattctaggtacctcacaaaatgtattatggtgccatggctgttagtttttagtgagtgctgtaggattaattcgaaaataggcagaattccattcctcccaaggtggcaaaaattagctatactgatgtaattgtcatttacctgggtatgaattccctgacacacattcatgtcaacatatgtagcaaattttgtgaaaacataacaatttgaagcttctgtaattttgagcactgctctaacaacaagcataatataaaattagttagattttgcaagtctacaaatgagctcttgcaacagaactcacagcctttttacttttttcccctaactttagcaatgtagtatcttgagccattaatttttgggtttttttaaaatccagaaggtatatagaaaccttttcagatttttcatctgatttgttcttgcagatgttcttctatcaaataccttattttaccttacagatatttgttgcacaggcagatactgctgtatttagacatttctatttcagttcattaaaaactgcaaaaccaatctgtatcatgtaccaaactgacttaaaataaatctacatgtttattgaatt

SEQ ID NO: 55 - DNA, 1235 bp, Homo sapiens
ggaggccggggcggggcgggcgcagccggcgctgagcttgcagggccgctcccctcacccgcccccttcgagtccccgggcttcgccccacccggcccgtgggggagtatctgtcctgccgccttcgcccacgccctgcactccgggaccgtccctgcgcgctctgggcgcaccatggcccgcggggctgcgctggcgctgctgctcttcggcctgctgggtgttctggtcgccgccccggatggtggtttcgatttatccgatgcccttcctgacaatgaaaacaagaaacccactgcaatccccaagaaacccagtgctggggatgactttgacttaggagatgctgttgttgatggagaaaatgacgacccacgaccaccgaacccacccaaaccgatgccaaatccaaaccccaaccaccctagttcctccggtagcttttcagatgctgaccttgcggatggcgtttcaggtggagaaggaaaaggaggcagtgatggtggaggcagccacaggaaagaaggggaagaggccgacgccccaggcgtgatccccgggattgtgggggctgtcgtggtcgccgtggctggagccatctctagcttcattgcttaccagaaaaagaagctatgcttcaaagaaaatgcagaacaaggggaggtggacatggagagccaccggaatgccaacgcagagccagctgttcagcgtactcttttagagaaatagaagattgtcggcagaaacagcccaggcgttggcagcagggttagaacagctgcctgaggctcctccctgaaggacacctgcctgagagcagagatggaggccttctgttcacggcggattctttgttttaatcttgcgatgtgctttgcttgttgctgggcggatgatgtttactaacgatgaattttacatccaaagggggataggcacttggacccccattctccaaggcccgggggggcggtttcccatgggatgtgaaaggctggccattattaagtccctgtaactcaaatgtcaaccccaccgaggcacccccccgtcccccagaatcttggctgtttacaaatcacgtgtccatcgagcacgtctgaaacccctggtagccccgacttctttttaattaaaataaggtaagcccttcaatttgtttcttcaatatttctttcatttgtagggatatttgtttttcatatcagactaataaaaagaaattagaaacc

SEQ ID NO: 56 - DNA, 6757 bp, Homo sapiens
gggcggggctgagggcggcgggggcgggccgcccgagctgggagggcggcggcgccgaggggaggagagcggcccatggacccgcggggcccggcgccccagactctgcgccgtcgggacggagcccaagatgtcggcctaggccggggcgcgacgacgcggacggggcggcgaggaggcgccgctgctgccggggctcgcagccgccgagcccccgagggcgcgccctgacggactggccgagccggcggtgagaggccggcgcgtcgggagcgggccgcgcggcaccatgtcggccaaggtgcggctcaagaagctggagcagctgctcctggacgggccctggcgcaacgagagcgccctgagcgtggaaacgctgctcgacgtgctcgtctgcctgtacaccgagtgcagccactcggccctgcgccgcgacaagtacgtggccgagttcctcgagtgggctaaaccatttacacagctggtgaaagaaatgcagcttcatcgagaagactttgaaataattaaagtaattggaagaggtgcttttggtgaggttgctgttgtcaaaatgaagaatactgaacgaatttatgcaatgaaaatcctcaacaagtgggagatgctgaaaagagcagagaccgcgtgcttccgagaggagcgcgatgtgctggtgaacggcgactgccagtggatcaccgcgctgcactacgcctttcaggacgagaaccacctgtacttagtcatggattactatgtgggtggtgatttactgaccctgctcagcaaatttgaagacaagcttccggaagatatggcgaggttctacattggtgaaatggtgctggccattgactccatccatcagcttcattacgtgcacagagacattaaacctgacaatgtccttttggacgtgaatggtcatatccgcctggctgactttggatcatgtttgaagatgaatgatgatggcactgtgcagtcctccgtggccgtgggcacacctgactacatctcgccggagatcctgcaggcgatggaggacggcatgggcaaatacgggcctgagtgtgactggtggtctctgggtgtctgcatgtatgagatgctctatggagaaacgccgttttatgcggagtcactcgtggagacctatgggaagatcatgaaccatgaagagcgattccagttcccatcccatgtcacggatgtatctgaagaagcgaaggacctcatccagagactgatctgcagtagagaacgccggctggggcagaatggaatagaggatttcaaaaagcatgcgttttttgaaggtctaaattgggaaaatatacgaaacctagaagcaccttatattcctgatgtgagcagtccctctgacacatccaacttcgacgtggatgacgacgtgctgagaaacacggaaatattacctcctggttctcacacaggcttttctggattacatttgccattcattggttttacattcacaacggaaagctgtttttctgatcgaggctctctgaagagcataatgcagtccaacacattaaccaaagatgaggatgtgcagcgggacctggagcacagcctgcagatggaagcttacgagaggaggattcggaggctggaacaggagaagctggagctgagcaggaagctgcaagagtccacccagaccgtgcagtccctccacggctcatctcgggccctcagcaattcaaaccgagataaagaaatcaaaaagctaaatgaagaaatcgaacgcttgaagaataaaatagcagattcaaacaggctcgagcgacagcttgaggacacagtggcgcttcgccaagagcgtgaggactccacgcagcggctgcgggggctggagaagcagcaccgcgtggtccggcaggagaaggaggagctgcacaagcaactggttgaagcctcagagcggttgaaatcccaggccaaggaactcaaagatgcccatcagcagcgaaagctggccctgcaggagttctcggagctgaacgagcgcatggcagagctccgtgcccagaagcagaaggtgtcccggcagctgcgagacaaggaggaggagatggaggtggccacgcagaaggtggacgccatgcggcaggaaatgcggagagctgagaagctcaggaaagagctggaagctcagcttgatgatgctgttgctgaggcctccaaggagcgcaagcttcgtgagcacagcgagaacttctgcaagcaaatggaaagcgagctggaggccctcaaggtgaagcaaggaggccggggagcgggtgccaccttagagcaccagcaagagatttccaaaatcaaatccgagctggagaagaaagtcttattttatgaagaggaattggtcagacgtgaggcctcccatgtgctagaagtgaaaaatgtgaagaaggaggtgcatgattcagaaagccaccagctggccctgcagaaagaaatcttgatgttaaaagataagttagaaaagtcaaagcgagaacggcataacgagatggaggaggcagtaggtacaataaaagataaatacgaacgagaaagagcgatgctgtttgatgaaaacaagaagctaactgctgaaaatgaaaagctctgttcctttgtggataaactcacagctcaaaatagacagctggaggatgagctgcaggatctggcagccaagaaggagtcagtggcccactgggaagctcagattgcggaaatcattcagtgggtcagtgacgagaaagatgcccggggttaccttcaagctcttgcttccaagatgaccgaagagctcgaggctttgaggagttctagtctggggtcaagaacactggacccgctgtggaaggtgcgccgcagccagaagctggacatgtccgcgcggctggagctgcagtcggccctggaggcggagatccgggccaagcagcttgtccaggaggagctcaggaaggtcaaggacgccaacctcaccttggaaagcaaactaaaggattccgaagccaaaaacagagaattattagaagaaatggaaattttgaagaaaaagatggaagaaaaattcagagcagatactgggctcaaacttccagattttcaggattccatttttgagtatttcaacactgctcctcttgcacatgacctgacatttagaaccagctcagctagtgagcaagaaacacaagctccgaagccagaagcgtccccgtcgatgtctgtggctgcatcagagcagcaggaggacatggctcggcccccgcagaggccatccgctgtgccgttgcccaccacgcaggccctggctctggctggaccgaagccaaaagctcaccagttcagcatcaagtccttctccagccctactcagtgcagccactgcacctccctgatggttgggctgatccggcagggctacgcctgcgaggtgtgttcctttgcttgccacgtgtcctgcaaagacggtgccccccaggtgtgcccaatacctcccgagcagtccaagaggcctctgggcgtggacgtgcagcgaggcatcggaacagcctacaaaggccatgtcaaggtcccaaagcccacgggggtgaagaagggatggcagcgcgcatatgcagtcgtctgtgactgcaagctcttcctgtatgatctgcctgaaggaaaatccacccagcctggtgtcattgcgagccaagtcttggatctcagagatgacgagttttccgtgagctcagtcctggcctcagatgtcattcatgctacacgccgagatattccatgtatattcagggtgacggcctctctcttaggtgcaccttctaagaccagctcgctgctcattctgacagaaaatgagaatgaaaagaggaagtgggttgggattctagaaggactccagtccatccttcataaaaaccggctgaggaatcaggtcgtgcatgttcccttggaagcctacgacagctcgctgcctctcatcaaggccatcctgacagctgccatcgtggatgcagacaggattgcagtcggcctagaagaagggctctatgtcatagaggtcacccgagatgtgatcgtccgtgccgctgactgtaagaaggtacaccagatcgagcttgctcccagggagaagatcgtaatcctcctctgtggccggaaccaccatgtgcacctctatccgtggtcgtcccttgatggagcggaaggcagctttgacatcaagcttccggaaaccaaaggctgccagctcatggccacggccacactcaagaggaactctggcacctgcctgtttgtggccgtgaaacggctgatcctttgctatgagatccagagaacgaagccattccacagaaagttcaatgagattgtggctcccggcagcgtgcagtgcctggcggtgctcagggacaggctctgtgtgggctacccttctgggttctgcctgctgagcatccagggggacgggcagcctctaaacctggtaaatcccaatgacccctcgcttgcgttcctctcacaacagtcttttgatgccctttgtgctgtggagctcgaaagcgaggagtacctgctttgcttcagccacatgggactgtacgtggacccgcaaggccggagggcacgcgcgcaggagctcatgtggcctgcggctcctgtcgcctgtagttgcagccccacccacgtcacggtgtacagcgagtatggcgtggacgtctttgatgtgcgcaccatggagtgggtgcagaccatcggcctgcggaggataaggcccctgaactctgaaggcaccctcaacctcctcaactgcgagcctccacgcttgatctacttcaagagcaagttctcgggagcggttctcaacgtgccggacacctccgacaacagcaagaagcagatgctgcgcaccaggagcaaaaggcggttcgtcttcaaggtcccagaggaagagagactgcagcagaggcgagagatgcttagagacccagaattgagatccaaaatgatatccaacccaaccaacttcaaccacgtggcccacatgggcccaggcgacggcatgcaggtgctcatggacctgcctctgagtgctgtgcccccctcccaggaggaaaggccgggccccgctcccaccaacctggctcgccagcctccatccaggaacaagccctacatctcgtggccctcatcaggtggatcggagcctagcgtgactgtgcctctgagaagtatgtctgatccagaccaggactttgacaaagagcctgattcggactccaccaaacactcaactccatcgaatagctccaaccccagcggcccaccgagccccaactccccccacaggagccagctccccctcgaaggcctggagcagccggcctgtgacacctgaagccgccagctcgccacaggggccagggagctggagatggcctccagcgtcagtgccaagactgagcgggccctccagtgttgtccaaggaaatgtagaatcactttgtagatatggagatgaagaagacaaatctttattataatattgatcagttttatgccgcattgttcgtggcagtagaccacatctgttcgtctgcacagctgtgaggcgatgctgttccatctgcacatgaaggacccccatacagcctgtctcccacccctgacaacccgagagggcatatggggccctgccaacaccacttcctcagcagaaacccgtcatgacgcggctgcttcggaagcagacatctggggacacagcctcagtacccagtcttttccctagttcctgaaactttcctaggaccttaagagaatagtaggaggtcctatagcattcccagtgtcactagaattttgaagacaggaaagtggaggttagtctgtggcctttttttcatttagccattgcacagtcagctgcagaagtcctgctgaccacctagtcatggacaaaggcccaggaccagtgacaccctgcgtccctgtgtgcattaagttcattctgggtcgcagccatgaagtgtcaccagtatctactactgtgaagtcagctgtgctgttttccattcgcttccacggcttctgcctcctgccataaaaccagcgagtgtcgtggtgcaggcaggccctgtggcctgctgggctgagggaagtcagagccccagggcgccacgaagcagccactgggataccccaccccgccccgccctgcccgcccccccccccaccagtcctgcccccgcatggagcccccgtgattagtagcccgtatgatcacgtagacccacccaacacactcctgcacactggccccggcccacggcacagcaatcccctgcgcgtggatttcacctcaccctttgtaccagatgttgagtgaccagctctgtggccctgtgtcgtcagaggcttgtgattaactgtggcggcagacacagcttgtccacagcttgggccaggcttcccctgtcctcccaccggtcggctgcttggcaaggctgttcaggacgtgcacttccccaagtcggcactgagtggcccagcaccgcctagccctgccaccccactgccctcctgggccttctgctggatgggcacctggggggttctggtttttacttttttaatgtaagtctcagtctttgtaattaattattgaattgtgagaacatttttgaacaatttacctgtcaataaagcagaagacggcagttttaaagtt

SEQ ID NO: 57 - DNA, 10540 bp, Homo sapiens
aggagccggaggaggagccgccgccgccgttgacccggccgccggccgggagctgggagagatgcggagcccggccaccggcgtccccctcccaacgccgccgccgccgctgctgctgctgttgctgctgctgctgccgccgccactattgggagaccaagtggggccctgtcgttccttggggtccaggggacgaggctcttcgggggcctgcgcccccatgggctggctctgtccatcctcagcgtcgaacctctggctctacaccagccgctgcagggatgcgggcactgagctgactggccacctggtaccccaccacgatggcctgagggtttggtgtccagaatccgaggcccatattcccctaccaccagctcctgaaggctgcccctggagctgtcgcctcctgggcattggaggccacctttccccacagggcaagctcacactgcccgaggagcacccgtgcttaaaggctccacggctcagatgccagtcctgcaagctggcacaggcccccgggctcagggcaggggaaaggtcaccagaagagtccctgggtgggcgtcggaaaaggaatgtaaatacagccccccagttccagccccccagctaccaggccacagtgccggagaaccagccagcaggcacccctgttgcatccctgagggccatcgacccggacgagggtgaggcaggtcgactggagtacaccatggatgccctctttgatagccgctccaaccagttcttctccctggacccagtcactggtgcagtaaccacagccgaggagctggatcgtgagaccaagagcacccacgtcttcagggtcacggcgcaggaccacggcatgccccgacgaagtgccctggctacactcaccatcttggttactgacaccaatgaccatgaccctgtgttcgagcagcaggagtacaaggagagcctcagggagaacctggaggttggctatgaggtgctcactgtcagggccacggatggtgatgcccctcccaatgccaatattctgtaccgcctgctggaggggtctgggggcagcccctctgaagtctttgagatcgaccctcgctctggggtgatccgaacccgtggccctgtggatcgggaagaggtggaatcctaccagctgacggtagaggcaagtgaccagggtcgggacccgggtcctcggagtaccacagccgctgttttcctttctgtggaggatgacaatgataatgccccccagtttagtgagaagcgctatgtggtccaggtgagggaggatgtgactccaggggccccagtactccgagtcacagcctcggatcgagacaaggggagcaatgccgtggtgcactatagcatcatgagtggcaatgctcggggacagttttatctggatgcccagactggagctctggatgtggtgagccctcttgactatgagacgaccaaggagtacaccctacgggtgcgagcacaggatggtggccgtcccccactctctaatgtctctggcttggtgacagtacaggtcctggatatcaacgacaatgcccccatcttcgtcagcacccctttccaggctactgtcctggagagtgtccccttaggctacctggttctccatgtccaggctatcgacgctgatgctggtgacaatgcccgcctggaataccgccttgctggggtgggacatgacttccccttcaccatcaacaatggcacaggctggatctctgtggctgctgaactggaccgggaggaagttgatttctacagctttggggtagaagctcgagaccatggcactccagcactcactgcctcggccagtgtcagcgtgactgtcctggatgtcaacgacaacaatccaacctttacccaaccagagtacacagtgcggctcaatgaggatgcagctgtgggcaccagcgtggtgacggtgtcagctgtggaccgtgatgctcatagtgtcatcacctaccagatcaccagtggcaatactcgaaaccgcttctccatcaccagccaaagtggtggtgggctggtatcccttgccctgccactggactacaaacttgagcggcagtatgtgttggctgttaccgcctccgatggcactcggcaggacacggcacagattgtggtgaatgtcaccgacgccaacacccatcgtcctgtctttcagagctcccactatacagtgaatgttaatgaggaccggccggcaggcaccacggtggtgctgatcagcgccacggatgaggacacaggtgagaatgcccgcatcacctacttcatggaggacagcatcccccagttccgcatcgatgcagacacgggggctgtcaccacccaggctgagctggactatgaagaccaagtgtcttacaccctggccattactgctcgggacaatggcattccccagaagtccgacaccacctacctggagatcctggtgaacgacgtgaatgacaatgcccctcagttcctgcgagactcctaccagggcagtgtctatgaggatgtgccacccttcactagcgtcctgcagatctcagccactgatcgtgattctggacttaatggcagggtcttctacaccttccaaggaggcgacgatggagacggtgactttattgttgagtccacgtcaggcatcgtgcgaacgctacggaggctggatcgagagaacgtggcccagtatgtcttgcgggcatatgcagtggacaaggggatgcccccagcccgcacacctatggaagtgacagtcactgtgttggatgtgaatgacaatccccctgtctttgagcaggatgagtttgatgtgtttgtggaagagaacagccccattgggctagccgtggcccgggtcacagccactgaccccgatgaaggcaccaatgcccagattatgtaccagattgtggagggcaacatccctgaggtctttcagctggacatcttctccggggagctgacagccctggtagacttagactacgaggaccggcctgagtacgtcctggtcatccaggccacgtcagctcctctggtgagccgggctacagtccacgtccgcctccttgaccgcaatgacaacccaccagtgctgggcaactttgagatccttttcaacaactatgtcaccaatcgctcaagcagcttccctgggggtgccattggccgagtacctgcccatgaccctgatatctcagatagtctgacttacagctttgagcggggaaatgaactcagcctggtcctgctcaatgcctccacgggtgagctgaagctaagccgcgcactggacaacaaccggcctctggaggccatcatgagcgtgctggtgtcagacggcgtacacagcgtgaccgcccagtgcgcgctgcgtgtgaccatcatcaccgatgagatgctcacccacagcatcacgctgcgcctggaggacatgtcacccgagcgcttcctgtcaccactgctaggcctcttcatccaggcggtggccgccacgctggccacgccaccggaccacgtggtggtcttcaacgtacagcgggacaccgacgcccccgggggccacatcctcaacgtgagcctgtcggtgggccagccgccagggcccgggggcgggccgcccttcctgccctctgaggacctgcaggagcgcctatacctcaaccgcagcctgctgacggccatctcggcacagcgcgtgctgcccttcgacgacaacatctgcctgcgggagccctgcgagaactacatgcgctgcgtgtcggtgctgcgcttcgactcctccgcgcccttcatcgcctcctcctccgtgctcttccggcccatccaccccgtcggagggctgcgctgccgctgcccgcccggcttcacgggtgactactgcgagaccgaggtggacctctgctactcgcggccctgtggcccccacgggcgctgccgcagccgcgagggcggctacacctgcctctgtcgtgatggctacacgggtgagcactgtgaggtgagtgctcgctcaggccgttgcaccccgggtgtctgcaagaatgggggcacctgtgtcaacctgctggtgggcggtttcaagtgcgattgcccatctggagacttcgagaagccctactgccaggtgaccacgcgcagcttccccgcccactccttcatcacctttcgcggcctgcgccagcgtttccacttcaccctggccctctcgtttgccacaaaggagcgcgacgggttgctgttgtacaatgggcgtttcaatgagaagcatgactttgtggccctcgaggtgatccaggagcaggtccagctcaccttctctgcaggggagtcaaccaccacggtgtccccattcgtgcccggaggagtcagtgatggccagtggcatacggtgcagctgaaatactacaataagccactgttgggtcagacagggctcccacagggcccatcagagcagaaggtggctgtggtgaccgtggatggctgtgacacaggagtggccttgcgcttcggatctgtcctgggcaactactcctgtgctgcccagggcacccagggtggcagcaagaagtctctggatctgacggggcccctgctactaggcggggtgcctgacctgcccgagagcttcccagtccgaatgcggcagttcgtgggctgcatgcggaacctgcaggtggacagccggcacatagacatggctgacttcattgccaacaatggcaccgtgcctggctgccctgccaagaagaacgtgtgtgacagcaacacttgccacaatgggggcacttgcgtgaaccagtgggacgcgttcagctgcgagtgccccctgggctttgggggcaagagctgcgcccaggaaatggccaatccacagcacttcctgggcagcagcctggtggcctggcatggcctctcgctgcccatctcccaaccctggtacctcagcctcatgttccgcacgcgccaggccgacggtgtcctgctgcaggccatcaccagggggcgcagcaccatcaccctacagctacgagagggccacgtgatgctgagcgtggagggcacagggcttcaggcctcctctctccgtctggagccaggccgggccaatgacggtgactggcaccatgcacagctggcactgggagccagcggggggcccggccatgccattctgtccttcgattatgggcagcagagagcagagggcaacctgggcccccggctgcatggtctgcacctgagcaacataacagtgggcggaatacctgggccagccggcggtgtggcccgtggctttcggggctgtttgcagggtgtgcgggtgagcgatacgccggagggggttaacagcctggatcccagccatggggagagcatcaacgtggagcaaggctgtagcctgcctgacccttgtgactcaaacccgtgtcctgctaacagctattgcagcaacgactgggacagctattcctgcagctgtgatccaggttactatggtgacaactgtactaatgtgtgtgacctgaacccgtgtgagcaccagtctgtgtgtacccgcaagcccagtgccccccatggctatacctgcgagtgtcccccaaattaccttgggccatactgtgagaccaggattgaccagccttgtccccgtggctggtggggacatcccacatgtggcccatgcaactgtgatgtcagcaaaggctttgacccagactgcaacaagacaagcggcgagtgccactgcaaggagaaccactaccggcccccaggcagccccacctgcctcttgtgtgactgctaccccacaggctccttgtccagagtctgtgaccctgaggatggccagtgtccatgcaagccaggtgtcatcgggcgtcagtgtgaccgctgtgacaacccttttgctgaggtcaccaccaatggctgtgaagtgaattatgacagctgcccacgagcgattgaggctgggatctggtggccccgtacccgcttcgggctgcctgctgctgctccctgtcccaaaggctcctttgggactgctgtgcgccactgtgatgagcacagggggtggctccccccaaacctcttcaactgcacgtccatcaccttctcagaactgaagggcttcgctgagcggctacagcggaatgagtcaggcctagactcagggcgctcccagcagctagccctgctcctgcgcaacgccacgcagcacacagctggctacttcggcagcgacgtcaaggtggcctaccagctggccacgcggctgctggcccacgagagcacccagcggggctttgggctgtctgccacacaggacgtgcacttcactgagaatctgctgcgggtgggcagcgccctcctggacacagccaacaagcggcactgggagctgatccagcagacagagggtggcaccgcctggctgctccagcactatgaggcctacgccagtgccctggcccagaacatgcggcacacctacctaagccccttcaccatcgtcacgcccaacattgtcatctccgtagtgcgcttggacaaagggaactttgctggggccaagctgccccgctacgaggccctgcgtggggagcagcccccggaccttgagacaacagtcattctgcctgagtctgtcttcagagagacgccccccgtggtcaggcccgcaggccccggagaggcccaggagccagaggagctggcacggcgacagcgacggcacccggagctgagccagggtgaggctgtggccagcgtcatcatctaccgcaccctggccgggctactgcctcataactatgaccctgacaagcgcagcttgagagtccccaaacgcccgatcatcaacacacccgtggtgagcatcagcgtccatgatgatgaggagcttctgccccgggccctggacaaacccgtcacggtgcagttccgcctgctggagacagaggagcggaccaagcccatctgtgtcttctggaaccattcaatcctggtcagtggcacaggtggctggtcggccagaggctgtgaagtcgtcttccgcaatgagagccacgtcagctgccagtgcaaccacatgacgagcttcgctgtgctcatggacgtttctcggcgggagaatggggagatcctgccactgaagacactgacatacgtggctctaggtgtcaccttggctgcccttctgctcaccttcttcttcctcactctcttgcgtatcctgcgctccaaccaacacggcatccgacgtaacctgacagctgccctgggcctggctcagctggtcttcctcctgggaatcaaccaggctgacctcccttttgcctgcacagtcattgccatcctgctgcacttcctgtacctctgcaccttttcctgggctctgctggaggccttgcacctgtaccgggcactcactgaggtgcgcgatgtcaacaccggccccatgcgcttctactacatgctgggctggggcgtgcctgccttcatcacagggctagccgtgggcctggaccccgagggctacgggaaccctgacttctgctggctctccatctatgacacgctcatctggagttttgctggcccggtggcctttgccgtctcgatgagtgtcttcctgtacatcctggcggcccgggcctcctgtgctgcccagcggcagggctttgagaagaaaggtcctgtctcgggcctgcagccctccttcgccgtcctcctgctgctgagcgccacgtggctgctggcactgctctctgtcaacagcgacaccctcctcttccactacctctttgctacctgcaattgcatccagggccccttcatcttcctctcctatgtggtgcttagcaaggaggtccggaaagcactcaagcttgcctgcagccgcaagcccagccctgaccctgctctgaccaccaagtccaccctgacctcgtcctacaactgccccagcccctacgcagatgggcggctgtaccagccctacggagactcggccggctctctgcacagcaccagtcgctcgggcaagagtcagcccagctacatccccttcttgctgagggaggagtccgcactgaaccctggccaagggccccctggcctgggggatccaggcagcctgttcctggaaggtcaagaccagcagcatgatcctgacacggactccgacagtgacctgtccttagaagacgaccagagtggctcctatgcctctacccactcatcagacagtgaggaggaagaagaggaggaggaagaggaggccgccttccctggagagcagggctgggatagcctgctggggcctggagcagagagactgcccctgcacagtactcccaaggatgggggcccagggcctggcaaggccccctggccaggagactttgggaccacagcaaaagagagtagtggcaacggggcccctgaggagcggctgcgggagaatggagatgccctgtctcgagaggggtccctaggcccccttccaggctcttctgcccagcctcacaaaggcatccttaagaagaagtgtctgcccaccatcagcgagaagagcagcctcctgcggctccccctggagcaatgcacagggtcttcccggggctcctccgctagtgagggcagccggggaggcccccctccccgcccaccgccccggcagagcctccaggagcagctgaacggggtcatgcccatcgccatgagcatcaaggcaggcacggtggatgaggactcgtcaggctccgaatttctcttctttaacttcctgcattaaccctgggccgtggttcctacgcccgaggctcccttcccttccccagccgcactcatgccctgctcctgtcttgtgctttatcctgccccgctccccatcgcctgcccgcagcagcgacgaaacgtccatctgaggagcctgggccttgccgggaggggtactcaccccacctaaggccatctagtgccaactccccccccaccattcccctcactgcactttggacccctggggccaacatctccaagacaaagtttttcagaaaagaggaaaaaaagaatttaaaaaaggatctccactcttcatgacttcagggattcattttttttatacgctggaaattgactcccctttcccttcccaaagaggataggacctcccaggatgcttcccagcctctcctcagtttcccatctgctgtgcctctgggaggagagggactcctggggggcctgcccctcatacgccatcaccaaaaggaaaggacaaagccacacgcagccagggcttcacacccttcaggctgcacccgggcaggcctcagaacggtgaggggccagggcaaagggtgtgcctcgtcctgcccgcactgcctctcccaggaactggaaaagccctgtccggtgagggggcagaaggactcagcgcccctggacccccaaatgctgcatgaacacattttcaggggagcctgtgcccccaggcgggggtcgggcagccccagcccctctccttttcctggactctggccgtgcgcggcagcccaggtgtttgctcagttgctgacccaaaagtgcttcatttttcgtgcccgccccgcgccccgggcaggccagtcatgtgttaagttgcgcttctttgctgtgatgtgggtgggggaggaagagtaaacacagtgctggctcggctgccctgagggtgctcaatcaagcacaggtttcaagtctgggttctggtgtccactcacccaccccaccccccaaaatcagacaaatgctactttgtctaacctgctgtggcctctgagacatgttctatttttaaccccttcttggaattggctctcttcttcaaaggaccaggtcctgttcctctttctccccgactccaccccagctccctgtgaagagagagttaatatatttgttttatttatttgctttttgtgttgggatgggttcgtgtccagtcccgggggtctgatatggccatcacaggctgggtgttcccagcagccctggcttgggggcttgacgcccttccccttgccccaggccatcatctccccacctctcctcccctctcctcagttttgccgactgcttttcatctgagtcaccatttactccaagcatgtattccagacttgtcactgactttccttctggagcaggtggctagaaaaagaggctgtgggcaggaaagaaaggctcctgtttctcatttgtgaggccagcctctggcttttctgccgtggattctcccccgtcttctcccctcagcaattcctgcaaagggttaaaaatttaactggtttttactactgatgacttgatttaaaaaaaatacaaagatgctggatgctaacttggtactaaccatcagattgtacagtttggttgttgctgtaaatagggtagcgttttgttgttgttgttttttcatgccccatactactgaataaactagttctgtgcgggtacagca

SEQ ID NO: 58 - DNA, 1815 bp, Homo sapiens
gggctcttcctcgcggaagtggggaggaggcggttgcggttagtggaccgggaccggtaggggtgctgttgccatcatggctgaccccgacccccggtaccctcgctcctcgatcgaggacgacttcaactatggcagcagcgtggcctccgccaccgtgcacatccgaatggcctttctgagaaaagtctacagcattctttctctgcaggttctcttaactacagtgacttcaacagtttttttatactttgagtctgtacggacatttgtacatgagagtcctgccttaattttgctgtttgccctcggatctctgggtttgatttttgcgttgattttaaacagacataagtatccccttaacctgtacctactttttggatttacgctgttggaagctctgactgtggcagttgttgttactttctatgatgtatatattattctgcaagctttcatactgactactacagtattttttggtttgactgtgtatactctacaatctaagaaggatttcagcaaatttggagcagggctgtttgctcttttgtggatattgtgcctgtcaggattcttgaagttttttttttatagtgagataatggagttggtcttagccgctgcaggagcccttcttttctgtggattcatcatctatgacacacactcactgatgcataaactgtcacctgaagagtacgtattagctgccatcagcctctacttggatatcatcaatctattcctgcacctgttacggtttctggaagcagttaataaaaagtaattaaaagtatctcagctcaactgaagaacaacaaaaaaaatttaatgagaaaaaaggattaaagtaattggaagcagtatatagaaactgtttcattaagtaataaagtttgaaacaatgattaaatactgttacaatctttatttgtatcatatgtaattttgagagctttaaaatcttactattctttatgatacctcatttctaaatccttgatttaggatctcagttaagagctatcaaaattctattaaaaatgcttttctggctgggcacagtggctcacgcctgtaatcccaccactttgggagaccgaggcaggtggatcacgaggtcaagaggttgagaccatcctggccaacatggtgaaaccccgtctctactaaaaatacaaaaattagctggatgtggtggcacacacctgtagtcccagctagtcaagaggctgaggccagagaatcgcttgaacctgggaggtggaggttgcattgagccaagatcacgccactgcattccagcctggtgacagagcgagactcagtctcaaaaaaaaaaaaaaaatttttcttcctaaattagccacgcatagcagttcgtttgcaattcaaaaataattttatgagtagataagaatatcagtttaccgttgtctagtgattttatctaaattttccctgaattattaagtaatattgatttggctttgattctgaagtagtagagtctttaccattataaactgtaaatctctttttgcttaaaaggaaaaaaatgtaaaagataaattccacagagaattattcagtattacattaaaatgttaatgactttttattttaaattgtactaacattaaaagttggcctgaaagtcagatattatgacaaaatttgacattaattgtttttaaagtatagatttcatttgaaattatagaatggtaatgtggttagaggacaccaaagatactgggtcatcagccattaagtatatctatttcaaaattaaaatatttgggaagt

SEQ ID NO: 59 - DNA, 2106 bp, Homo sapiens
accacggccctaaggagggcggaagtcgtcgctccgtggagcctcctcctctcgcgagaggcgcaaggcgtggagtcgacggctggagagaagccgggagcgagcccaggcggcagtcttgattcccttttggccagcagtttttaggtctgtcagtactgcactgcaagaatggcagattttgggatctctgctggccagtttgtggcagtggtctgggataagtcatccccagtggaggctctgaaaggtctggtggataagcttcaagcgttaaccggcaatgagggccgcgtgtctgtggaaaacatcaagcagctgttgcaatctgcccacaaagaatccagctttgacattattttgtcaggtttagtcccaggaagcaccactctgcacagtgctgagattttggctgaaatcgcccggatccttcggcctggtggatgtctttttctgaaggagccagtagagacagctgtagataacaatagcaaagtgaagacagcatctaagctgtgttcagccctgactctttctggtcttgtggaagtgaaagagctgcagcgggagcccctaacccctgaggaagtacagtctgttcgagaacaccttggtcatgaaagtgacaacctgctgtttgttcagatcacaggcaaaaaaccaaactttgaagtgggttcttctaggcagcttaagctttccatcaccaagaagtcttctccttcagtgaaacctgctgtggaccctgctgctgccaagctgtggaccctctcagccaacgatatggaggacgacagcatggatctcattgactcagatgagctgctggatccagaagatttgaagaagccagatccagcttccctgcgggctgcttcttgtggggaagggaaaaagaggaaggcctgtaagaactgcacctgtggccttgccgaagaactggaaaaagagaagtcaagggaacagatgagctcccaacccaagtcagcttgtggaaactgctacctgggcgatgccttccgctgtgccagctgcccctaccttgggatgccagccttcaaacctggggaaaaggtgcttctgagtgatagcaatcttcatgatgcctaggaggttcctgacatgggacccatctgctcctccagccaactcctgtccctcacatcccaccatggtggctcctcccacctcctctggatttgttcactctgagatctgtttgcagagtgggtgcttagcagacagagtgaagctggctggggggcacagtggtgtgtagtgctgctgtgtatcaaaagaccaaggtattatgggacctggtttcagaatgggatgggtttcttcacctcatgttaagagaagggagtgtgtcctgaagaagcccttcttctgatgttaaaatgctgaccagaacgctcttgagcccaggcatcgttgagcattaacactctgtgacagagctgcagacccctgccttgagtctcatctcagcaatgctgccaccctcttgtctttcagagttgttagtttactccattctttgtgacacgagtcaagtggctcacaacctcctcagggcaccagaggactcactcactggttgctgtgatgatatccagtgtccctctgcccccttccatccccaaccacatttgactgtagcattgcatctgtgtcctgttgtcatttatgttaaccttcaggtattaaacttgctgcatatcttgacatatcttgagattctgcatgtcttgtaaagagaggggatgtgcatttgtgtgtgatgttggatagtcatccacgctcagtttggaccattggaggaacttagtgtcacgcacaaatggggctattcctacgcttagaatagggcttgtctgcccactttagaagagtccaggttggtgagcatttagagggaagcagggcagaactctgaacgacaatacgtctctctgagcagagacccctttgttcttgttatccacccatatggacttggaatcaatcttgccaaatatttggagagattgtgtggatttaagagacctggatttttatattttaccagtaaataaaagttttcattgatatctgtccttgaaa

SEQ ID NO: 60 - DNA, 6264 bp, Homo sapiens
gagtgtggctgcagtgcgccgggacaccagggctccgcgctccgcactcaagaggctcccgcgtcccaacccctcgcgcccgcgcgttcgcggatccaggccgaggaccgaaaggggccgcccgagcccccggggccggcgcccagagagcccagcaaggccggccgccctgccggtgtgccgccggcgggtgcttctggaagggccaatgcgttcgggcagcagcccctgaagccgagcccgaggctaagtgggactgaccggggcccagagtggacgaaccgccagcatggggagagaccagcgcgcggtggccggccctgccctacggcggtggctgctgctggggacagtgaccgtggggttcctcgcccagagcgtcttggcgggtgtgaagaagtttgatgtgccgtgtggaggaagagattgcagtgggggctgccagtgctaccctgagaaaggtggacgtggtcagcctgggccagtgggcccccaggggtacaatgggccaccaggattacaaggattcccgggactgcagggacgtaaaggagacaagggtgaaaggggagcccccggagtaacgggacccaagggcgacgtgggagcaagaggcgtttctggattccctggtgccgatggaattcctggacacccggggcaaggtgggcccaggggaaggccgggctacgatggctgcaacggaacccagggagactcaggtccacaggggccccccggctctgaggggttcaccgggcctcccgggccccaaggaccaaaagggcagaaaggtgagccttatgcactgcctaaagaggagcgcgacagatatcggggtgaacctggagagcctggattggtcggtttccagggacctcccggccgccctgggcatgtgggacagatgggtccagttggagctccagggagaccaggaccacctggaccccctggaccaaaaggacagcaaggcaacagaggacttggtttctacggagttaagggtgaaaagggtgacgtagggcagccgggacccaacgggattccatcagacaccctccaccccatcatcgcgcccacaggagtcaccttccacccagatcagtacaagggtgaaaaaggcagtgagggggaaccaggaataagaggcatttccttgaagggagaagaaggaatcatgggctttcctggactgaggggttaccctggcttgagtggtgaaaaaggatcaccaggacagaagggaagccgaggcctggatggctatcaagggcctgatggaccccggggacccaagggagaagccggagacccagggccccctggactacctgcctactcccctcacccttccctagcaaaaggtgccagaggtgacccgggattcccaggggcccaaggggagccaggaagccagggtgagccaggagacccgggcctcccaggtccccctggcctctccatcggagatggagatcagaggagaggcctgccgggtgagatgggacccaagggcttcatcggagaccccggcatccctgcgctctacgggggcccacctggacctgatggaaagcgagggcctccaggaccccccgggctccctggaccacctggacctgatggcttcctgtttgggctgaaaggagcaaaaggaagagcaggcttccctgggcttcccggctcccctggagcccgcggaccaaaggggtggaaaggtgacgctggggaatgcagatgtacagaaggcgacgaagctatcaaaggtcttccgggactgccaggacccaagggcttcgcaggcatcaacggggagccggggaggaaaggggacagaggagaccccggccaacacggcctccctgggttcccagggctcaagggagtgcctggcaacattggtgctcccggacccaaaggagcaaaaggagattccagaacaatcacaaccaaaggtgagcggggacagcccggcgtcccaggtgtgcccgggatgaaaggtgacgatggcagcccaggccgcgatgggctcgatggattccccggcctcccaggccctcccggtgatggcatcaagggccctccaggggacccaggctatccaggaatacctggaacgaagggtactccaggagaaatgggccccccaggactgggccttcccggcctcaaaggccaacgtggtttccctggagacgccggcttacctggaccaccaggcttcctgggccctcctggccccgcagggaccccaggacaaatagattgtgacacagatgtgaaaagggccgttggaggtgacagacaggaggccatccagccaggttgcataggagggcccaagggattgccaggcctgccaggacccccaggccccacaggtgccaaaggcctccgaggaatcccaggcttcgcaggagctgatggaggaccagggcccaggggcttgccaggagacgcaggtcgtgaagggttcccaggacccccagggttcataggaccccgaggatccaaaggtgcagtgggcctccctggcccagatggatccccaggtcccatcggcctgccagggccagatgggccccctggggaaaggggcctccctggagaagtcctgggagctcagcccgggccacggggagatgctggtgtgcctggacagcctgggcttaaaggccttcccggagacagaggcccccctggattcagaggtgaccaagggatgcctgggatgccagggctgaagggccagccaggcctcccaggaccttccggccagccaggcctgtatgggcctccaggactgcatggattcccaggagctcctggccaagaggggcccttggggctgccaggaatcccaggccgtgaaggtctgcctggtgatagaggggaccctggggacacaggcgctcctggccctgtgggcatgaaaggtctctctggtgacagaggagatgctggcttcacaggggagcaaggccatccaggaagccctggatttaaaggaattgatggaatgcctgggacccccgggctaaaaggagatagaggctcacctgggatggatggtttccaaggcatgcctggactcaaagggagacccgggtttccagggagcaaaggcgaggctggatttttcggaatacccggtctgaagggtctggctggtgagccaggttttaaaggtatccgaggggaccctgggcccccaggaccacctcctgtcatcctgccaggaatgaaagacattaaaggagagaaaggagatgaagggcctatggggctgaaaggatacctgggcgcaaaaggtatccaaggaatgccaggcatcccagggctgtcaggaatccctgggctgcctgggaggcccggccacatcaaaggagtcaagggagacatcggagtccccggcatccccggtttgccaggattccctggggtggctggcccccctggaattacgggattcccaggattcataggaagccggggtgacaaaggtgccccagggagagcaggcctgtatggcgagattggcgcgactggtgatttcggtgacatcggggacactataaatttaccaggaagaccaggcctgaagggggagcggggcaccactggaataccaggtctgaagggattctttggagagaagggaacagaaggtgacatcggcttccctgggataacaggcgtgactggagtccaaggccctcctggacttaaaggacaaacaggctttccagggctgactgggcctccagggtcgcagggagagctggggcggattggactgcctggtggcaaaggagatgatggctggccgggagctccgggcttaccaggttttccgggactccgtgggatccgcggcttacacggcttgccaggcaccaagggctttccaggatccccaggttctgacatccacggagacccaggcttcccaggccctcctggggaaagaggtgacccaggagaggccaacacccttccaggccctgtgggagtcccaggacagaaaggagaccaaggagctccaggggaacgaggcccacctgggagcccaggacttcaggggttccctggtatcacacccccttccaacatctctggggcacctggtgacaaaggggcgccagggatatttggcctgaaaggttatcggggcccaccagggccaccaggttctgctgctcttcctggaagcaaaggtgacacagggaacccaggagctccaggaaccccagggaccaaaggatgggccggggactccgggccccagggcaggcctggtgtgtttggtctcccaggagaaaaagggcccaggggtgaacaaggcttcatggggaacactggacccactggggcggtgggcgacagaggccccaagggacccaagggagacccaggattccctggtgcccccgggactgtgggagcccccgggattgcaggaatcccccagaagattgccgtccaaccagggacagtgggtccccaggggaggcgaggcccccctggggcaccgggggagatggggccccagggcccccccggagaaccaggtttccgtggggctccagggaaagctgggccccaaggaagaggtggtgtgtctgctgttcccggcttccggggagatgaaggacccataggccaccaggggccgattggccaagaaggtgcaccaggccgtccagggagcccgggcctgccgggtatgccaggccgcagcgtcagcatcggctacctcctggtgaagcacagccagacggaccaggagcccatgtgcccagtgggcatgaacaaactctggagtggatacagcctgctgtacttcgagggccaggagaaggcgcacaaccaggacctggggctggcgggctcctgcctggcgcggttcagcaccatgcccttcctgtactgcaaccctggtgatgtctgctactatgccagccggaacgacaagtcctactggctctctaccactgcgccgctgcccatgatgcccgtggccgaggacgagatcaagccctacatcagccgctgttctgtgtgtgaggccccggccatcgccatcgcggtccacagtcaggatgtctccatcccacactgcccagctgggtggcggagtttgtggatcggatattccttcctcatgcacacggcggcgggagacgaaggcggtggccaatcactggtgtcaccgggcagctgtctagaggacttccgcgccacaccattcatcgaatgcaatggaggccgcggcacctgccactactacgccaacaagtacagcttctggctgaccaccattcccgagcagagcttccagggctcgccctccgccgacacgctcaaggccggcctcatccgcacacacatcagccgctgccaggtgtgcatgaagaacctgtgagccggcgcgtgccaggaagggccattttggtgcttattcttaacttattacctcaggtgccaacccaaaaattggttttatttttttcttaaaaaaaaaaaagtctaccaaaggaatttgcatccagcagcagcacttagacctgccagccactgtcaccgagcgggtgcaagcactcggggtccctggagggcaagccctgcccacagaaagccaggagcagccctggcccccatcagccctgctagacgcaccgcctgaaggcacagctaaccacttcgcacacacccatgtaaccactgcactttccaatgccacagacaactcacattgttcaactcccttctcggggtgggacagacgagacaacagcacacaggcagccagccgtggccagaggctcgaggggctcagggcctcaggcacccgtccccacacgagggccccgtgggtgggcctggccctgctttctacgccaatgttatgccagctccatgttctcccaaataccgttgatgtgaattattttaaaggcaaaaccgtgctctttattttaaaaaacactgataatcacactgcggtaggtcattcttttgccacatccctatagaccactgggtttggcaaaactcaggcagaagtggagacctttctagacatcattgtcagccttgctacttgaaggtacaccccatagggtcggaggtgctgtccccactgccccacgttgtccctgagatttaacccctccactgctgggggtgagctgtactcttctgactgccccctcctgtgtaacgactacaaaataaaacttggttctgaatatttttaaa

SEQ ID NO: 61 - DNA, 3478 bp, Homo sapiens
agccaaggactctggagccgccgccgccgctgctgcggttcatagccggagtagacggagccgcagtagacggatccgcggctgcaccaaaccactgcccctcggagcctggtagtgggccacaagcccccagtcccagaggcgtggtgggtcgggcagagtcggaagaactggctttctagctggaagatgcggaaggggagcgactaggccgcttgcgtctgggcctggcagaagggaccggattttctggcatccttaaatcttgtgtcaaggattggttataatataaccagaaaccatgacggcggctgagaacgtatgctacacgttaattaacgtgccaatggattcagaaccaccatctgaaattagcttaaaaaatgatctagaaaaaggagatgtaaagtcaaagactgaagctttgaagaaagtaatcattatgattctgaatggtgaaaaacttcctggacttctgatgaccatcattcgttttgtgctacctcttcaggatcacactatcaagaaattacttctggtattttgggaaattgttcctaaaacaactccagatgggagacttttacatgagatgatccttgtatgtgatgcatacagaaaggatcttcaacatcctaatgaatttattcgaggatctactcttcgttttctttgcaaattgaaagaagcagaattgctagaacctttaatgccagctattcgtgcatgtttggagcatcgacacagctatgttagaagaaatgctgttttggccatctataccatctatagaaattttgaacatcttatacctgatgctcctgaactgatacatgattttctggtgaatgagaaggatgcaagttgcaaaaggaatgcatttatgatgctaattcatgcagatcaggatcgagctttggattacttaagtacttgcattgatcaagttcaaacatttggagacattctgcagctggttattgttgaactgatttataaggtctgtcatgctaatccatcagaaagagctcgttttattcgctgcatctataacttattacagtcatccagccctgctgtaaaatatgaagctgctgggacattagtgacactctctagtgcaccaactgcaatcaaggctgctgctcagtgttacattgatttaattattaaggagagcgacaacaatgtaaaactcatagttttggatcgcttgatagaattaaaagagcatcctgctcatgaacgagtactacaggatctggttatggatatcctaagagtattgagcacaccagacttagaagtacgaaagaaaactctgcagttagcactggatcttgtctcttctagaaatgttgaagagctggttattgtcctgaagaaggaagtgataaaaacaaataatgtgtctgagcatgaagatactgacaaatacagacaactcctagtgcgaacattgcattcctgttctgtccgatttccagatatggctgcaaatgttattcctgtgttaatggaatttctcagtgacaacaacgaagcagcagctgctgatgtcttggagtttgttcgtgaagccattcagcgctttgataacctgagaatgcttattgttgagaagatgcttgaagtctttcatgctattaaatctgtcaagatttaccgaggagcattatggatcctgggagaatactgtagtaccaaggaagacattcagagtgtgatgactgagatccgcaggtcccttggagagatcccaattgtagagtcagaaataaagaaagaagctggtgaattaaaacctgaagaagaaataactgtagggccagttcagaaattggttactgaaatgggtacctatgcaactcagagtgcccttagcagttctagacccaccaagaaagaggaagacagacctcccttgagaggattccttctggatggagatttctttgttgctgcctcccttgccacaactctgaccaagattgcattgcgctatgtagctttggttcaggagaagaaaaagcaaaattcttttgttgctgaggctatgttgctcatggctactatcctgcatttgggaaaatcctctcttcctaagaagccaattactgatgatgatgtggatcgaatttccctgtgcctcaaggtcttgtctgaatgttcacctttaatgaatgacattttcaataaggaatgcagacagtccctttctcacatgttatctgctaaactagaagaagagaaattatcccaaaagaaagaatctgaaaagaggaatgtgacagtacagcctgatgaccccatttccttcatgcaactaactgctaagaatgaaatgaactgcaaggaagatcagtttcagctgagtttactggcagcaatgggtaacacacagaggaaagaggcagcagatcccctagcatctaaacttaacaaggtcacccaattgacaggtttctcagatcctgtatatgcagaagcttacgttcatgtcaaccaatatgatattgtcctggatgtacttgttgtgaaccaaaccagtgatactttgcagaattgcacattagaactagctacactaggggatctgaaacttgtggaaaagccgtctcctttgactcttgctcctcatgacttcgcaaatattaaagctaacgtcaaagtagcatcaacagaaaatggaataatttttggtaatatagtttatgatgtctctggagcagcaagtgacagaaattgtgtggttctcagtgatattcacatcgacatcatggactatatccagcctgcaacttgcactgatgcagaattccgtcagatgtgggccgaatttgaatgggaaaacaaagtgacagttaacaccaacatggttgatttaaatgactacttacagcacatattaaagtcaaccaatatgaaatgcctgactccagaaaaggccctttctggttactgtggctttatggcagccaacctttatgctcgttccatatttggtgaagatgcacttgcaaatgtcagcattgagaagccaattcaccagggaccagatgctgctgttaccggccatataagaattcgtgcaaagagccagggaatggccttaagtcttggagataaaatcaacttgtcacagaagaaaactagtatataaaaataaacaaaaagtccttgaagctttacagttaatttaggtatgggcttactggactccaacatcttttgtactctttcatgcttatatagaatctgagttcatgctgaatacttttcagccaataatttatagcctttcccttaaatcaagattgagtttaaaattatagtttgtcttttgtcttaacagttctgaatgctgtcctcaaagtatataatgtttcatgtaccaagacccttttcacagtacaataaacagatctattcataaatttttgttattttataaataaatgattacataattttagtt

SEQ ID NO: 62 - DNA, 3092 bp, Homo sapiens
ctcatatctagaattttgggaggtactttgaatcattacgatctatctacttcttaggtgaggaaatagaggtttaaaatttagtccacagtctcgcaaggatggagcctggatcaaattttgggttatcagattccaatcacgtttcttagcttttcttttttttttccaactccagtttctgtcttgctccaaaaaaggggaaggagcggctgcggcgctcggtttcccgcctcctagggaagggaagggagacgagcagcgcggaggctggggcccccttccgggcggggcctactagtgggcggggcctgtcagtgagcggcccctgcccggaaggagccagtccggggcggagccgatggccttacaggggccggaagtggcctgcgggcggagaagtgcctcaggagtcctgacgcagtgtcttgggcgctaacggcggcggcggccttgtgtttagactccagaactccccacttgccgcgttctcgccgccgcaggctcccgggacgatggtgccccgcctgctgctgcgcgcctggccccggggccccgcggttggtccgggagcccccagtcggcccctcagcgccggctccgggcccggccagtacctgcagcgcagcatcgtgcccaccatgcactaccaggacagcctgcccaggctgcctattcccaaacttgaagacaccattaggagatacctcagtgcacagaagcctctcttgaatgatggccagttcaggaaaacagaacaattttgcaagagttttgaaaatgggattggaaaagaactgcatgagcagctggttgctctggacaaacagaataaacatacaagctacatttcgggaccctggtttgatatgtacctatctgctcgagactccgttgttctgaactttaatccatttatggctttcaatcctgacccaaaatctgagtataatgaccagctcacccgggcaaccaacatgactgtttctgccatccggtttctgaagacactccgggctggccttctggagccagaagtgttccacttgaaccctgcaaaaagtgacactatcaccttcaagagactcatacgctttgtgccttcctctctgtcctggtatggggcctacctggtcaatgcgtatcccctggatatgtcccagtattttcggcttttcaactcaactcgtttacccaaacccagtcgggatgaactcttcactgatgacaaggccagacacctcctggtcctaaggaaaggaaatttttatatctttgatgtcctggatcaagatgggaacattgtgagcccctcggaaatccaggcacatctgaagtacattctctcagacagcagccccgcccccgagtttcccctggcatacctgaccagtgagaaccgagacatctgggcagagctcaggcagaagctgatgagtagtggcaatgaggagagcctgaggaaagtggactcggcagtgttctgtctctgcctagatgacttccccattaaggaccttgtccacttgtcccacaatatgctgcatggggatggcacaaaccgctggtttgataaatcctttaacctcattatcgccaaggatggctctactgccgtccactttgagcactcttggggtgatggtgtggcagtgctcagattttttaatgaagtatttaaagacagcactcagacccctgccgtcactccacagagccagccagctaccactgactctactgtcacggtgcagaaactcaacttcgagctgactgatgccttaaagactggcatcacagctgctaaggaaaagtttgatgccaccatgaaaaccctcactattgactgcgtccagtttcagagaggaggcaaagaattcctgaagaagcaaaagctgagccctgacgcagttgcccagctggcattccagatggccttcctgcggcagtacgggcagacagtggccacctacgagtcctgtagcactgccgcattcaagcacggccgcactgagaccatccgcccggcctccgtctatacaaagaggtgctctgaggcctttgtcagggagccctccaggcacagtgctggtgagcttcagcagatgatggttgagtgctccaagtaccatggccagctgaccaaagaagcagcaatgggccagggctttgaccgacacttgtttgctctgcggcatctggcagcagccaaagggatcatcttgcctgagctctacctggaccctgcatacgggcagataaaccacaatgtcctgtccacgagcacactgagcagcccagcagtgaaccttgggggctttgcccctgtggtctctgatggctttggtgttgggtatgctgttcatgacaactggataggctgcaatgtctcttcctacccaggccgcaatgcccgggagtttctccaatgtgtggagaaggccttagaagacatgtttgatgccttagaaggcaaatccatcaaaagttaacttctgggcagatgaaaagctaccatcacttcctcatcatgaaaactgggaggccgggcatggtggctcatgcctgtaatcccagcattttgagaggctgaggcgggtggatcacttgaggtcaggagtttgagaccaacctggccaacatggtgaaaccttgtctctactaaaaatacaaaaattagctgggtgtggtggcatgtgcctataatcccagctacttgggaggttgaagcagaattgcttgaacccaggaggtggaggttgcagtgagctgagatcacaccactgcactccggcctgggcgacagagcgagactgtctcaaaaaaacaaaaaagaaaaaaaaactggggcctgtgtagccagtgggtgctattctgtgaaactaatcataagctgcctaggcagccagctacaggcttgagctttaaattcatggttttaaagctaaacgtaatttccacttgggactagatcacaactgaagataacaagagatttaagttttaagggcatttaatcaggaggaaaggtttggaaaactaactcaggtgtatttattgtttaagcagaaataaagtttaatttttgcttg

SEQ ID NO: 63 - DNA, 5583 bp, Homo sapiens
ggcccggctgcgaggaggaggcggcggcggcgcaggaggatgtacttggtggcgggggacagggggttggccggctgcgggcacctcctggtctcgctgctggggctgctgctgctgctggcgcgctccggcacccgggcgctggtctgcctgccctgtgacgagtccaagtgcgaggagcccaggaactgcccggggagcatcgtgcagggcgtctgcggctgctgctacacgtgcgccagccagaggaacgagagctgcggcggcaccttcgggatttacggaacctgcgaccgggggctgcgttgtgtcatccgccccccgctcaatggcgactccctcaccgagtacgaagcgggcgtttgcgaagatgagaactggactgatgaccaactgcttggttttaaaccatgcaatgaaaaccttattgctggctgcaatataatcaatgggaaatgtgaatgtaacaccattcgaacctgcagcaatccctttgagtttccaagtcaggatatgtgcctttcagctttaaagagaattgaagaagagaagccagattgctccaaggcccgctgtgaagtccagttctctccacgttgtcctgaagattctgttctgatcgagggttatgctcctcctggggagtgctgtcccttacccagccgctgcgtgtgcaaccccgcaggctgtctgcgcaaagtctgccagccgggaaacctgaacatactagtgtcaaaagcctcagggaagccgggagagtgctgtgacctctatgagtgcaaaccagttttcggcgtggactgcaggactgtggaatgccctcctgttcagcagaccgcgtgtcccccggacagctatgaaactcaagtcagactaactgcagatggttgctgtactttgccaacaagatgcgagtgtctctctggcttatgtggtttccccgtgtgtgaggtgggatccactccccgcatagtctctcgtggcgatgggacacctggaaagtgctgtgatgtctttgaatgtgttaatgatacaaagccagcctgcgtatttaacaatgtggaatattatgatggagacatgtttcgaatggacaactgtcggttctgtcgatgccaagggggcgttgccatctgcttcaccgcccagtgtggtgagataaactgcgagaggtactacgtgcccgaaggagagtgctgcccagtgtgtgaagatccagtgtatccttttaataatcccgctggctgctatgccaatggcctgatccttgcccacggagaccggtggcgggaagacgactgcacattctgccagtgcgtcaacggtgaacgccactgcgttgcgaccgtctgcggacagacctgcacaaaccctgtgaaagtgcctggggagtgttgccctgtgtgcgaagaaccaaccatcatcacagttgatccacctgcatgtggggagttatcaaactgcactctgacagggaaggactgcattaatggtttcaaacgcgatcacaatggttgtcggacctgtcagtgcataaacaccgaggaactatgttcagaacgtaaacaaggctgcaccttgaactgtcccttcggtttccttactgatgcccaaaactgtgagatctgtgagtgccgcccaaggcccaagaagtgcagacccataatctgtgacaagtattgtccacttggattgctgaagaataagcacggctgtgacatctgtcgctgtaagaaatgtccagagctctcatgcagtaagatctgccccttgggtttccagcaggacagtcacggctgtcttatctgcaagtgcagagaggcctctgcttcagctgggccacccatcctgtcgggcacttgtctcaccgtggatggtcatcatcataaaaatgaggagagctggcacgatgggtgccgggaatgctactgtctcaatggacgggaaatgtgtgccctgatcacctgcccggtgcctgcctgtggcaaccccaccattcaccctggacagtgctgcccatcatgtgcagatgactttgtggtgcagaagccagagctcagtactccctccatttgccacgcccctggaggagaatactttgtggaaggagaaacgtggaacattgactcctgtactcagtgcacctgccacagcggacgggtgctgtgtgagacagaggtgtgcccaccgctgctctgccagaacccctcacgcacccaggattcctgctgcccacagtgtacagatcaaccttttcggccttccttgtcccgcaataacagcgtacctaattactgcaaaaatgatgaaggggatatattcctggcagctgagtcctggaagcctgacgtttgtaccagctgcatctgcattgatagcgtaattagctgtttctctgagtcctgcccttctgtatcctgtgaaagacctgtcttgagaaaaggccagtgttgtccctactgcatagaagacacaattccaaagaaggtggtgtgccacttcagtgggaaggcctatgccgacgaggagcggtgggaccttgacagctgcacccactgctactgcctgcagggccagaccctctgctcgaccgtcagctgcccccctctgccctgtgttgagcccatcaacgtggaaggaagttgctgcccaatgtgtccagaaatgtatgtcccagaaccaaccaatatacccattgagaagacaaaccatcgaggagaggttgacctggaggttcccctgtggcccacgcctagtgaaaatgatatcgtccatctccctagagatatgggtcacctccaggtagattacagagataacaggctgcacccaagtgaagattcttcactggactccattgcctcagttgtggttcccataattatatgcctctctattataatagcattcctattcatcaatcagaagaaacagtggataccactgctttgctggtatcgaacaccaactaagccttcttccttaaataatcagctagtatctgtggactgcaagaaaggaaccagagtccaggtggacagttcccagagaatgctaagaattgcagaaccagatgcaagattcagtggcttctacagcatgcaaaaacagaaccatctacaggcagacaatttctaccaaacagtgtgaagaaaggcaactaggatgaggtttcaaaagacggaagacgactaaatctgctctaaaaagtaaactagaatttgtgcacttgcttagtggattgtattggattgtgacttgatgtacagcgctaagaccttactgggatgggctctgtctacagcaatgtgcagaacaagcattcccacttttcctcaagataactgaccaagtgttttcttagaaccaaagtttttaaagttgctaagatatatttgcctgtaagatagctgtagagatatttggggtggggacagtgagtttggatggggaaatgggtgggagggtggtgttgggaagaaaaattggtcagcttggctcggggagaaacctggtaacataaaagcagttcagtggcccagaggttatttttttcctattgctctgaagactgcactggttgctgcaaagctcaggcctgaatgagcaggaaacaaaaaaggccttgcgacccagctgccataaccaccttagaactaccagacgagcacatcagaaccctttgacagccatcccaggtctaaagccacaagtttcttttctatacagtcacaactgcagtaggcagtgaggaagccagagaaatgcgatagcggcatttctctaaagcgggttattaaggatatatacagttacactttttgctgcttttattttcttccaagccaatcaatcagccagttcctagcagagtcagcacatgaacaagatctaagtcatttcttgatgtgagcactggagcttttttttttttacaacgtgacaggaagaggagggagagggtgacgaacaccaggcatttccaggggctatatttcactgtttgttgttgctttgttctgttatattgttggttgttcatagtttttgttgaagctctagcttaagaagaaactttttttaaaaagactgtttggggattctttttccttattatatactgattctacaaaatagaaactacttcattttaattgtatattattcaagcacctttgttgaagctcaaaaaaaatgatgcctctttaaactttagcaattataggagtatttatgtaactatcttatgcttcaaaaaacaaaagtatttgtgtgcatgtgtatataatatatatatatacatatatatttatacacatacaatttatgttttcctgttgaatgtatttttatgagattttaaccagaacaaaggcagataaacaggcattccatagcagtgcttttgatcacttacaaattttttgaataacacaaaatctcattctacctgcagtttaattggaaagatgtgtgtgtgagagtatgtatgtgtgtgtgtgtgtgtgtgtgtgtgcgcgcgcacgcacgccttgagcagtcagcattgcacctgctatggagaagggtattcctttattaaaatcttcctcatttggatttgctttcagttggttttcaatttgctcactggccagagacattgatggcagttcttatctgcatcactaatcagctcctggattttttttttttttttttcaaacaatggtttgaaacaactactggaatattgtccacaataagctggaagtttgttgtagtatgcctcaaatataactgactgtatactatagtggtaacttttcaaacagcccttagcacttttatactaattaacccatttgtgcattgagttttcttttaaaaatgcttgttgtgaaagacacagatacccagtatgcttaacgtgaaaagaaaatgtgttctgttttgtaaaggaactttcaagtattgttgtaaatacttggacagaggttgctgaactttaaaaaaaattaatttattattataatgacctaatttattaatctgaagattaaccatttttttgtcttagaatatcaaaaagaaaaagaaaaaggtgttctagctgtttgcatcaaaggaaaaaaagatttattatcaaggggcaatatttttatcttttccaaaataaatttgttaatgatacattacaaaaatagattgacatcagcctgattagtataaattttgttggtaattaatccattcctggcataaaaagtctttatcaaaaaaaattgtagatgcttgctttttgttttttcaatcatggccatattatgaaaatactaacaggatataggacaaggtgtaaatttttttattattattttaaagatatgatttatcctgagtgctgtatctattactcttttactttggttcctgttgtgctcttgtaaaagaaaaatataatttcctgaagaataaaatagatatatggcacttggagtgcatcatagttctacagtttgtttttgttttcttcaaaaaagctgtaagagaattatctgcaacttgattcttggcaggaaataaacattttgagttgaaatc

SEQ ID NO: 64 - DNA, 1581 bp, Homo sapiens
agagctcgcagctccgccggcgcctggtcccagcgcccgcggcgccgcgtccccggcccaaccatggcgtcctccgcggccggctgcgtggtgatcgttggcagaattaaaactctgtacccattgaacaacagctgctcatttcccccagccccagcccctggcatccacccttctagctttctgtctctatgggtacctcagtggagtcattgggcgaagctgggccatgctgtttgccagtggaggcttccaggtgaaactctatgacattgagcaacagcagataaggaacgccctggaaaacatcagaaaggagatgaagttgctggagcaggcaggttctctgaaaggctccctgagtgtggaagagcagctgtcactcatcagtggttgtcccaatatccaagaagcagtagagggtgccatgcacattcaggaatgtgttccagaagatctagaactgaagaagaagatttttgctcagttagattccatcattgatgatcgagtgatcttaagcagttccacttcttgtctcatgccttccaagttgtttgctggcttggtccatgtgaagcaatgcatcgtggctcatcctgtgaatccgccatactacatcccgctggttgagctggtcccccacccggagacggcccctacgacagtggacagaacccacgccctgatgaagaagattggacagtgccccatgcgagtccagaaggaggtggccggcttcgttctgaaccgcctgcaatatgcaatcatcagcgaggcctggcggctagtggaggaaggaatcgtgtctcctagtgacctggaccttgtcatgtcagaagggttgggcatgcggtatgcattcattggacccctggaaaccatgcatctcaatgcagaaggtatgttaagctactgcgacagatacagcgaaggcataaaacatgtcctacagacttttggacccattccagagttttccagggccactgctgagaaggttaaccaggacatgtgcatgaaggtccctgatgacccggagcacttagctgccaggaggcagtggagggacgagtgcctcatgagactcgccaagttgaagagtcaagtgcagccccagtgaatttcttgtaatgcagcttccactcctctcattggaggccctatttgggaacactgcaagcccttaatcagccctctgtgacataggtagcagcccacggagatcctaagctggctgtcttgtgtgcagcctgagtggggtggtgcaggccggtagtctgcccgtcactttggatcatagccctgggcctggcggcacagcagcacttgcgttctcggggctgtcgatttcctgccacctgggcagataacctggagattttcaccttttcttttcagcttgattgcatttgactatattttacagccagtgattgtagtttcatgttaatatgtggcaaaatatttttgtaattattttctaatccctttctgagtactctggggccctgcatttatgaggcacctaccttcattttgctaacgcttattctgaataaaagtttttgattccttaaa

SEQ ID NO: 65 - DNA, 9233 bp, Homo sapiens
gaggagagggcgcgttagtgagcagcgactgtggcattgatgtttgagcatacttctgaactggcttttgttgagactatcagtatagaagcatgcgctgtcccaaatccgctgttactatgagaaatgaagagctgcttttaagtaacggcacagccaacaagatgaacggagctttggatcactcagaccaaccagacccagatgccattaagatgtttgtcggacagatcccccggtcatggtcggaaaaggagctgaaagaactttttgagccttacggagccgtctaccagatcaacgtcctccgggaccggagtcagaaccctccgcagagtaaaggttgttgtttcgtaacattttatacaagaaaagctgcacttgaggcccagaatgcactgcacaatattaaaactttacctgggatgcatcatcccattcagatgaaacctgcagatagtgaaaagtccaacgctgtggaagacagaaaattgttcataggaatggtatcgaagaaatgtaatgagaacgacatcagggtgatgttctctccatttggccagatagaagaatgccggatcctccggggacctgatgggctgagtcgaggctgtgcgtttgtcacattttctacaagggcaatggcacagaatgcaatcaaagccatgcatcagtctcagaccatggagggctgctcttcacctatcgtggtgaagtttgctgacactcagaaggacaaagagcaaaggcgcctccagcagcagctcgctcagcagatgcagcagctcaacactgccacctgggggaacctgacagggctgggcggactgaccccacagtatctggcgctcctgcagcaggccacctcctccagcaacctgggtgcgttcagcggcattcaacaaatggcaggcatgaatgctttacagttgcagaacctggcgacgctggctgctgctgcagctgcggcccagacctcagccaccagcaccaatgcaaaccctctctctaccacgagcagcgccctgggagccctcacgagtcccgtggctgcttcaacccccaactccactgctggtgcagccatgaactccttgacctctctcgggactctgcaaggactggctggagccactgttggactgaataatattaatgcactagcaggtatggcggctctgaatggaggacttggcgccacaggcttgacgaatggcacggctggcaccatggacgccctcacccaggcctactcaggaattcaacagtacgcagccgccgcgctgcccactctgtacagccagagcctgctgcagcagcagagcgctgcaggcagccagaaggaaggtccagagggggcaaacctctttatttaccaccttccacaggaatttggagaccaggacattctgcagatgttcatgccttttggaaatgttatctctgctaaagtcttcattgacaaacagaccaatctgagcaagtgctttggttttgttagctacgacaatccagtctctgcacaagctgctatccaagctatgaatggctttcagatcggcatgaaacgcttgaaggtgcagctgaagcgttccaaaaacgacagcaaaccttactgatcctaaccccagaggctccctgctctcattttagctttcttagggtaagtcccacgagccagcctgtctcaacagggaaggcagaggaggaccacattgccaacttttaccaagagagacggttatttttacaataaggcctccatgtccccacccacttcccctacccagtttgccataattaaaacttgggctactttgtttctattgagtaattcctcctccagttgtgccactgtattctcctttgttttgcgatttgaatctccttttacctttttttttaatttttttcatttttgcttttttttaaagagaagcatatacacaaataaatggcatcttgagaatttaaaaggcaaacaaacaaacgctaatgtgcaattctaactctgaaaccactggtgccccgagagcactgcctggagaattcacccctccttgcccggcgcccgcccccggagggagggcccggtgcttagaggttaacttggtggcctaggagagggagaagccaggagaagcacttactccaaccacacgtctttccactacatcggcttgttttactaagtaggattttattttagggttcaaagaaacatgacatttattggtcaaaatattacactggttgtctattttgttattgttttattttagtttttagaaaggattaatgtacaaaaagatttagagatctgtttcttaaagctacagggtttaaaaaataaaaatgagtgaaaatacttgatgtttcttgaaagataaatttaataataataaataaatacataaatacataaataaaaaagaaagccacaggcctgtaaattttatttgtaaaaaagcatttctatttttatacaaaatttttactgcctcagaaataatggaagttatttattgcctattgttaacttattgggtacctaaagagcagttctctgtctagctagaaccttctgaagtagtctctagaggaattgttctaggaatgggctttttttcaccgttgaaccctagacctgaagttcatgctttatcctctcgttgtttgtatctgtctgattattttgtttgtaacttccattatctagtttacagttcagtcgtctgactttccccgtatgtcacatttgttgaaactggaccttctccccctgtccctcaccccaaaacacccggaatccatcccgtttcgctctctccagatggattctcttggggtttcattgtgctgtggataaggagtgtaagaaatgcaaattatgtgaatggctcggagactccctaatgacctaagatttgcattagtttttctcctgcacccttaaaagtgattttgttgccgctgcatagattctgtgtaactttttactcttccttgttttttccctagacatcttcatgcccgttagttcatcgtttgcctagcatgtccctgtggcgtctcaaaaaaaagtttcatcgtcccgtcattgtttctgatgtctttctgacctcacatcatatttggttctcctactgacctttgatctagtttgacctttgaaatttgcatgtgacctcatctagctatgaattctgggaagtcaatgtgaaaaacattgctgcattcatgcaagactgaaatttattattagacaaattcattatagaaaaaacctgtggcaaaaacgtttctttcttattttttttcttttcctaaaacagacttgaaagtattatacagggattggcattcttcccggtcactggtaacaatagcaatatgtgtccagggacacagaatgttggtttctaacagactacttccaaaaacagtttgagaaaaaaactgtctgattttaagtctctagaggtctgtaatagtttttacatttttcaggcagtgtaaagttttttgataaggccattttaggtggctcactttctcattaagatatatatatagaaccactttttgtagattagtataagaaaaatatttaccctgttttggggcaaatgctacctatttgtgtcaccttttgctgaactcacagttagacaatccatggtttaatgcacatgaaattacctatattttatactgtttcaatgtacaggagaaaggttactgtaaactgtgttatgttggtgcttctgtgaattaagttgtggtttcatcatgagtcttaatgttctttgttgataagacaagtttagaattggtttacttaatacaaaaaaaaaaaaaagaatttcaaaaaaaaaagttgtttgcttaaaaaaaatttcatgtgagggaaaaaaaaaaaacctattccagaataagttttgtgttggcttgtgaagcattgatgtcattttttttaattgtggactatttagatgtgtttgtgttcagcaaaatgtgatgtttttttcttttaaagaaaaaaagtgaaaatatatagtgccaaattccaaaggtacttccttcctagagcttcagtgtgtttcttgtgagaagtaatttgataacatgggtattttattatgtgttttgtataaatccctaatatttaaaaaaaaaaacaaaacaaaaaaaggttacaaagtttgttaacttgctatcctgtggtcttgttgcctgaaattgttattgtttgttatttctctctgatgttttttgtaagacattgtataagtgcccatgtcccacttttttaaccactccgcacatcagtgctgtgaaggcaacctcaccatgtattttcttcataatctatggaaacctctaaggtgagaaagttttgaacttttaaccctttctacccagagctatctggaatgttgatgactttttatactgtcatgatttgagtttgttttggggtgtttccaatttggatttttttccctgcatctatcctctaagttgtttcggtttgactactttgttctttggttaagatccaaaagaaaacagaaaacaattccacgaggccaatctaaagggaaaaaatcctacactacttttactacttttgattatttctcatttttgggaaaagaattcctaatgtgctactagaattccttcttcagttttaacgagtaattggataaaccctgagggaaaacggaggtagattcagcacctaacaatcctgtatgcttttgagatcacgtttagtgctatgtcctagtctagaatattttcatataccttgcagtaaaacgactttgtggcaggacagtctcttgaggggttttgtttctgtttcctaaatactcctaaataatatttctaatcagccattatgctggggcatctctgatcccagtaggtacctctgaatataccaggtgtctggagttagaagcccatagccctttcccagcctttttggtttttttaattgaacacatttcatctaagtaaagctcagttctttatcacaatttactgaccaaatacctagcaccagttcctgctgccactttttaaagtgccatatgactttctacgaacaggtaccttgctgtcttgacaaatcctaatgtcacgcctacagccccaacacaagctccagtcttcctcttcggcatgccctggaagcttcttggcctcagctccccttccccgctcagcaccctgttaggatcagtgtgtgtggatgggatagccctgggatggaaaggactagcctctactgatgcaaaaaaacaaaaagcaacacaaacgtttccttcttatagcacatgcacttccttacaatgacatgatttgtattatcctcacatgtgtttactactgctggggccttccttcatcctctgagggctattttgtactttctgcagcaatcagcttaataacaacacttattgcacctgtctctctctgagaacacggtgtgtctcgacacgtaccacgtacgtggaaacacaagagcccaccacttgaatttctaagaccatttcattctgaaacttcttatcaattacctaaatctcaacgaaaaacaatttactgaagccgactcccctccccatctccctctcaacctcaacccacctgcatgcatctcccccagaggaaacactgagggtaggggacaggaggctcaggacgcgccctctgaatcgagtgtttcttcttcacaagtcaccaagagaggacatgagggggaaagtcctttttgcccttctccaaaaaataaccttccacagagacaaactgtccttctatccacttttatcttttaataaatatcaaaaggaaaaagctgcaagggtgcaaagggcctgtgccagaagaaaacacacacagggaaaccgctttttttaatcaattgtagagaatagtcatttttaatctaaattagagaattgtgatacaatggcagtcctcaaaggcgtaacgagttcatctttctttcaccataggggttatagttggcttgtgctactctggaatcattttactgtttgtttttattatcttaagtgctaattaaaaaaaaaataaaattttaaaaaaacctgtagtttcattacctttttgaataatgtcatacaaaaaatgtatttgtttttttgtgctgtgagaattgatgtttgtagattaataatcattttgtttagaattacaaaatagtttttaaatattgtctgagaaaagccaaagttaatgcaacctagtggaaactgtaagaccatttgagtattgtttgttttattgatgcatttggattttgttgtttgatggaatttgagccaaaaaaaaaatacgcaggctttcctatttctacaactgattgtacttatgcattttgtaccagtggaactttttatactggagattaaaaaaaaaatggaaatttttgtggcttgctctggtgggcccctgacaatgactgatttcaagtttgatttcgggttgattgattgattgattgatagaaagaaagttgcttttcttttgagaattaaaaactttggcttgatttcttttttccctttgcttatatctagcattagaattttgtcttaaaataacagcggtaagtttcactttttattctgtattgtgcagttacacaataaggtaattagatttagaagtactcagtcactttaagtggataaatgtattagttaaaactttagggtttgcttttttgctgtttagatcaaagttttttctgattcttctgtcctcattgtgaacataaccgtgtagttgaaacagtcaaacttatttttgtaatgtatgttattgtgtgatgcagttttttgcttctgtctccaatattaaaccattttcctaatacttgtttctctctctgcgtgttgtattgttggtagtcattatatgttggtgatacatctgcacacctcactgtttcacgtatctgtttttttctctatgttgtgtaaaaagatacagtcgattccacttaagtgaatatctgatttggggaagaggaaactgcacagcagccacctttgatttatgtacaaccgcccacttgaactcctgcttccaagatttatacacttttttcctacagttcacctcagtaactgcctttggggttggatttgccaaggtgttttacggtcttttgaccacacaggttaatttccccttctctcccctccctcatgagtctatccacgcagttcttaacatacattccaaactgctgcggggtttcctctccacacccacgaggccaaacccgcatcattacagtccaactcttcttagacactaatcactttctaaaagaagtgagttctccagggaagaaaaatcaacttagccagtgaaaagggttaaacttaagtctattatttgttgccctcaatcaaaagatatgtatagaaaagtcatttaaattatttatttctacaagctaattgaatccaggagcagctttaattattaacactaacggaagagaaaagaagtatttccaagggctcaaatggaagctgtactcagtccggtggaggcagggggaggtaaagtttctcacactcaagtcgtcttcatagtttactgtccttttccaaacaaaagctaataacgccatacgcatccacacactccctcctggatgaacctaagtctcgtccccactgtcaccccaaggccagttatcaaaaactgttccttctctgccctcaaagactgaagccgcaggccctgttctgcctctgctcaggaatctgattgctcttaaagtgctcttacaagattccgtcgatgtttgctccctctgtcttatctctccttccagtattttcagacgcacaagctctgactcaggccacccagcacctggcagccttcctctgcgtgccagtgaaatctctcccagtaggtgctcaggctcttcaccctctcgttgcagcagcccctctggcccgagattgtattttctagtctgctcaagaacagaggggcctggcgaggtggaggaagggaggctccctccccggggctggccgcctcagtgatggtgatgccaccagctccagcctgcacggatggagctcacttcctaccatcacttctgctttcagtctcctcatagccttcggcagtctcctctgaaaacacactgcctacgttagtgggaaaggatggctaagggtgtgatttctttttattagggaggtgggagggggatgttgggaggcatggggggtgattaaattatcatttccaaggtgcaagtgtttatttttcaaatctataagtacatagttccaccattttggcacaagacaaaatactcatgctaagcaaaggaagagaaagacaaagccagtttttgttgcttttctaaagcaacaaataattctccaaagaaggggatgaaaatgctagttcctttaagcacttactgactgtaaagttggtccctgcttaaattcatacccatagttttgagtcggtatgacaccactgcagtgtgagcaaggtgaatccgtgtgccatgcatggaccaccttgggataccgcagcaccatcaacatccgccttgctgatggaagccacacacgctgcccagcccacagcagtcgcacgcagccgatgggctcggactcttagctggcaggctaggacacacagtgaacattaatgtactgtgaatcgttcctgataagtgaataaaacattgtgaccaaacaatcagcttattcacttatcaggaatcgactgttctgctaatttgctgttgttgtttttcatctctgttgtagttcactatttttgctgtgttctgttttctcctctcatgcttgggcaaatcactgggaatattatcttcatgtgaccatgaaacgtttctattgagtgaaaatgatatcttaacaaaatctatgcacttgctatcaggaacacaatactggatgtgtcttatatatattgaactatatagtactcgatttcttaaataaagcttaagaaaggactctgttgtgtgtaaagttaatgtgattatttttcaaagcagtgtttctaaggggtatttttgttcttttaagtcttgagtgatacaggatatttttcattaaaattatatcactggctttatgacttaatattcaataaattgactttgg

SEQ ID NO: 66 - DNA, 4854 bp, Homo sapiens
ggcgcggagccgggcggtgggaatggagcgagcagattgaggccgccactgcagcgccgccagcatgaacttggccgcgagctgaagcggccggcggcgggcgggcgcgggggcaccggccgctagccagggggtgatctgcaacagggctgggttccttggcggccgcctgagtccaggctgcccgcgccggcggccgcccgcccctcggacactgcccccgccgccgccggagctctgcagcacgccctgtgtctaggtcgtttgggaaacgccttggagagtcaagaataaatttgcaggtcaaacaatggatgactggaaaagtcggcttgtaatcaagagcatgcttccccatttcgccatggtgggaaatcgtcaggagcccagaaagctccaggaatcgggaaagaagccctcgtggatggaggaagaagatttatcttttctctacaagagcagcccaggaagaaagcatcagggaactgttaagaggagacaagaagaagaccacttccagtttccagacatggctgatgggggctaccctaataaaattaagaggccttgccttgaagatgtcacccttgcaatgggcccaggtgctcatcctagtactgcttgtgcagaactgcaggtccctccattgacaataaatcctagccctgcggctatgggagtggctggccagtcattactgctggagaataaccctatgaatggcaacatcatgggctcaccatttgtagtaccacagactacagaagtgggactgaaagggcccactgttccttactatgagaaaatcaacagcgtgccggctgtagaccaggagcttcaagagctgctagaggagctcaccaaaattcaagacccttctccaaatgagctagatcttgagaagatactggggacgaagccagaagagccactggttttagatcatccccaggcaaccctaagcacaactcccaagccttcggttcagatgtcacacttggagagcctggcttccagcaaggagtttgcttctagttgcagccaagttactggcatgtcacttcagatcccatcctcctccacagggatcagctattcgattccttccaccagtaagcagatagtgtcaccgagttcttcaatggcacagtccaagagccaggtccaggccatgctccctgtcgctctgccccccttaccagtgcctcagtggcatcacgcccaccagctgaaggcgttggcagccagcaagcaggggtctgctacaaagcagcaagggcccacccccagttggtctggtctgcctcctccaggactctctccaccttaccgcccagtgccatcaccacacccaccaccgctgccactgccaccaccaccacccccattcagcccccagagcctcatggtgtcctgcatgtcgtccaataccttgtcgggtagcactctccgaggctctcccaatgccttactgtcaagcatgacgtccagcagcaatgctgccctggggcccgccatgccctatgctcctgagaagctccccagccctgctctcactcaacagccgcagttcggccctcagagctccattcttgccaacctcatgtcctctaccatcaaaacccctcaaggacacctgatgtctgctctgcctgccagcaaccctgggccgtccccaccctatcgcccagagaagctctctagcccaggcttgccacagcagtccttcaccccacagtgttccctgatccgaagcctcactcccaccagtaatcttctaagccagcaacagcagcagcagcagcagcagcagcaagcaaatgtgatctttaagcccataagcagcaactcatccaaaaccctgagcatgatcatgcagcaggggatggcaagctccagcccaggagccacggagccatttacttttggcaacaccaagcccttgtcccattttgtttctgagccgggtccccagaagatgccctccatgcctaccacctctaggcagccttccctgctccactacctgcagcagccgacaccaacgcaggcctcctcagccactgcctcctccacggccactgccaccttgcagctgcagcagcagcagcagcaacagcagcagcagcctgaccattcttcattccttctgcagcagatgatgcagcaaccccagcgttttcagcgatcagtggcctcagattccatgcctgctctgcccagacagggctgttgccatctgtttgcatggacttctgcagctagctcggtgaagccccagcatcaacacgggaactctttcactagcaggcaagatcctcagcctggagacgtgtcaccgtctaacattactcatgtagacaaagcctgcaagcttggggaagccaggcacccccaggtcagcctcgggcgacagcccccgtcctgccaggccctggggagtgagtccttcctgcccggcagctcctttgctcatgagctggcccgagtcacctcctcgtacagcacctcagaggcagcgccctggggcagctgggatccgaaggcctggaggcaggtgcccgctccactactgcctagctgcgacgccacagcaagaggaacagagatcaggtcttatggcaatgacccctgaacggcagaatgcatatatctcccaacagatgagtccatttgaagccgtccaagaacaagtcacctccaagtgtagccggatcaaggcaagccccccatctagcaagcacttgatgccacccagaactgggcttcttcagaacaatctgagtccaggaatgatcccactcaccaggcaccagagctgcgagggcatgggagtgatctcaccaactctggggaagcggcaaggaattttcacctccagcccccagtgtcccatcctctcacactcaggccagactcccctgggcagacttgactctgtctgccagcatatgcagagccccaaggccaccccaccagaagtgcccctgcctgggttctgtcccagctccctgggcacccagtccttgagtccccaccagctcagacggcctagtgtgccaagaatgcccactgcgttcaacaatgctgcatgggtcacagcggcagcagctgtgaccacagcagtttcggggaaaacacccctcagccaagtggataatagcgttcagcagcactcaccttctggccaggcctgccttcagaggccatctgattgggaggcacaagtgcccgctgcgatgggaacacaagtgcccctggccaacaaccccagcttcagcctgctgggcagccagagcctcaggcagagcccggtacagggcccggtgcctgtagcaaacaccaccaagttcctccagcagggtatggccagctttagtcccctgagccccatacagggcatcgagccaccaagctatgtggctgctgctgccaccgctgctgctgcttctgccgttgctgccagccagttcccaggtccgttcgacagaacggatattccccctgagctgccacctgccgactttttgcgccagccccaacccccactaaatgatctgatttcgtcacctgactgcaatgaggtagatttcattgaagctctcttgaaaggctcctgtgtgagcccagatgaagactgggtgtgcaacttgaggctgatcgacgacattttggaacagcatgctgctgctcaaaatgccacagcccagaattctgggcaagtcacccaggatgctggggcactttaaatctgagcaggatgcccatagaaacccccatggtgacatcactctaggaagtggtgtcgatccatacccgcagttgtctcccgttacaatttgagtggtgttgtcagcccatgcttatccctctctctacctgtgacaaaatggaaagctggtgatttttcaagctacgtgtacatatttgaaaattttgtaaatggttttcctaaacattaatgacagaagtatttatacttcattttgtgactttgtaaataaagcgacggcttttgtttcagtagagttgtgtttactatgcattgttttgtgtttattatacaatgttacaaatatgcagaccgtgttgtttgctccagtgataccttgttaagctaggtggctgagtcgcttatggttttaatgcaatgagcaatgtggatatgaccaagagttgttgtgcaagttgacaaatgccaaatagaaaaccacttggccatttatttctatgttcactaaaaatcctattgccttgtgtgattcttaatctcttttgcgaacctttcagtctccgctagctctttcctaatgagctttacagcagaagctgttttatcgttaagtgccccacagagacactttaccaggaggctgggagagttctccagatttgggagaggcgcagagacagtgtgtgagccgagccctgtctcagcaatccacctggaggagctagagtatcctcctccctttaccattcagaccgagagaaaaagcccagcttgtgtgcaccctcgtggggttaaggcgagctgttcctggtttaaagcctttcagtatttgttttgatgtaaggctctgtggtttgggggggaacatctgtaaacattattagttgatttggggtttgtctttgatggtttctatctgcaattatcgtcatgtatatttaagtgtctgttatagaaaacccacacccactgtcctgtaaacttttctcagtgtccagactttctgtaatcacattttaattgccacctcgtatttcacctctacatttgaaatctggcgtctgtttcaagccagtgtgttttttcttcgttctgtaataaacagccaggagaaaagtgcc

SEQ ID NO: 67 - DNA, 4357 bp, Homo sapiens
gagttggggccagctccccacccccaagaggccccacattccgggccagcagcccagaaagtccctccccgcaggcggagacagccccaagaagtcgacgccccggtcccgccgcccggccactacccagagggctgccgccgcctctccaagttcttgtggcccccgcggtgcggagtatggggcgctgatggccatggagggctactggcgcttcctggcgctgctggggtcggcactgctcgtcggcttcctgtcggtgatcttcgccctcgtctgggtcctccactaccgagaggggcttggctgggatgggagcgcactagagtttaactggcacccagtgctcatggtcaccggcttcgtcttcatccagggcatcgccatcatcgtctacagactgccgtggacctggaaatgcagcaagctcctgatgaaatccatccatgcagggttaaatgcagttgctgccattcttgcaattatctctgtggtggccgtgtttgagaaccacaatgttaacaatatagccaatatgtacagtctgcacagctgggttggactgatagctgtcatatgctatttgttacagcttctttcaggtttttcagtctttctgcttccatgggctccgctttctctccgagcatttctcatgcccatacatgtttattctggaattgtcatctttggaacagtgattgcaacagcacttatgggattgacagagaaactgattttttccctgagagatcctgcatacagtacattcccgccagaaggtgttttcgtaaatacgcttggccttctgatcctggtgttcggggccctcattttttggatagtcaccagaccgcaatggaaacgtcctaaggagccaaattctaccattcttcatccaaatggaggcactgaacagggagcaagaggttccatgccagcctactctggcaacaacatggacaaatcagattcagagttaaacagtgaagtagcagcaaggaaaagaaacttagctctggatgaggctgggcagagatctaccatgtaaaatgttgtagagatagagccatataacgtcacgtttcaaaactagctctacagttttgcttctcctattagccatatgataattgggctatgtagtatcaatatttactttaatcacaaaggatggtttcttgaaataatttgtattgattgaggcctatgaactgacctgaattggaaaggatgtgattaatataaataatagcagatataaattgtggttatgttacctttatcttgttgaggaccacaacattagcacggtgccttgtgcagaatagatactcaatatgtgaatatgtgtctactagtagttaattggataaactggcagcatccctggcctgttgtcatgcagtcatttcctgttaattctgggagacaatgatttcacaactagcgggaagcagtcctaaaagtttaaaatccgataaggaatatctgggacagggtttagatcatgactctacacagataccatgatgagagtatattaaagaaatttaggaaagcacctggttcctttctccccatgcctgccttctgctccctccccagctggtttgggctcaaattgtccctggagactagggtttatgttagggtattgatagattagagcaggtggttgaagagatcttctctggtcagacttggaagaatttccaaaactgaagttagccccaagacttccctagggttgatgtactttatgatccagatgctaaacttcttagaatgaaaatatgcttcaacacttaagtagcatacactgccctacaaacctcagagagcacttttccccaagttcttgtttttatttttgaaagtactcacacagcacttactatgctccaaacactcctctaagcactttacacatattagctcattcagtccccagacagacgggatgaagtaggtattgttactgttcccattttacaggtgagagatttgaagcctggggaggctagtaactcaccccaaggtcacacggctcatacatggtgggactgagactcagatgcaggcagtctggcacctcagtctggattctaaccatttcactaagctatttttgtcttgtactactttgacccacccctgaataaacctcaattgctggagtggggtgtagttattaaagggatgctttttaccttttgctgtttgctgtggcagattccccagataaccaaggaaaaggggccacccatacctggaaataggccatagggcccctactactgccaacaagccatggcctaccttgacacttgtttgatcttaaaattgtgtcttggtaacaaaagatttggacaggcatatctgtagctttcaagttaattaattgcaatatttttttcttcaggattttagctgctgaacaactttcagtttggagctaaaagagacctgtctcatggtctgcccttccctggggcaatagctagggtctttcctgatttttatggaattttaggggatattttgagctttgggttctcagtagtgaattgagacttggaggtgacttttcatgtttggagtatcatctctgtctgggatctgggctgacaaattaaaacctagagtagtgcttatgctgaaatgatacttttcattttttggttgatttttttgccttcccttcaattttaaactgaagcattttaatatgggtagaaactctacaccaaatacactaaacattttggtgcttagtggatttctttttaggtaactggtacttacttccaaagactgaatacaagccacactccatcatatcccttaaacttcatgaaaaaccattcaagatccccttgctgcaacactgttctcttcttctctactaaattctatttccaaaattggtaatagagccagaaggatccccagtacccagccctctgcctggcacaaagtggtagcacaattaaattcagtatgggtggagcatggtacagtcttggtgccatagaaggagtagttgcatagtcacacatcatttgataagttggatgttccattacatagaggaacacaaaattccagggtttttggaggaagggattagatagtgactaagccgccagaattgaggtggccattcctttttgtataggctaagaaacaggttatcagtgaaaagttaattatggctttggcactagaatagcactgttgcaaagtatttaagcaccccccatctcagccctttattttatctttcatgtgggctaatgtgaggataatcttacagatattataggaatttcttttctatctttatgaaaacaacgtatataaaatatatctagaaaacctttgtttgagactcttatttaatgggcttttgattctaatgataattgtacctttatctttcaaaagctgatatttcctacctaagcatctcccgagaaaaatatctcattaaaaagcccataaataataggggagaagaaagccttaggtatcaattccaaaacagtgattgaaatttcccaaaataattatggcttctgtcatctccagagataatctggcttggtttaccccataatctaatttcagaaaagaaagctttattttaacactcatctgaatcaacattaaagccttttctctcaaagcgtttattgagaaactcaaatgaatatactttttgaattactgtcatcaaaagtgtacggcttcctgtgctgcttgtgtcaaatggaacctgccctctaaagcactttctttcctttacttgcgtggtttcatgtaagctgtgctgtttagaaacaacatctcagactttacaaagaaatgacaaagaaggcaattgcactttttaagggatatcgacaagcagtttctgttttctaaaggacaaaatacagagtgtgtgtcatttttaattagattctttcccctgctgagttggaaattccagtgcagcactgattgaccacagttgccaatctaaaagcacaaagacagaagtaaagctttatgctaattttatttcaatatgatagaaaatttatcttggtatgtccttttttagataactccagcaggaaactgtaactgctatgtctttaggaaaatgtagaagaaagaacattattgttctttaattcctacaaggtactcgaaaaccttaagtgaaaaagatttctatctttttatcttagcgcatttatggaaaaaatattaactatcctgaatattttataattttgtaggaaaaatatgcatctattttttcttgacttcttttatatagtaataaaagttattttggaagctc

SEQ ID NO: 68 - DNA, 2266 bp, Homo sapiens
aaacacgcccatggccgccttggcgcgctttcaaacgctcaggtttcctaccttccggctgcttgggaacttctttcttgcccgccaagcccgcagccacccgggcgcggcgggactcctagacccggcgctgcgatgaagaggacccgcgacgaggtggatgcgacgctgcagatcgccaagctgaatgcggccgagctgctgccggcggtgcactgcctgggcttcggccctggggccagcggcgctgcagccggcgacttctgcctgctggagctggagcccacgctgtgccagcagctggaggatggacacagtcttgtgattcgtggtgataaagacgagcaagctgtgctgtgcagtaaagacaaaacatacgacttgaagatagcagacacttccaatatgttgcttttcattcctggttgtaaaactccggaccagttgaagaaggaagattcacactgtaacattattcacactgagatctttggtttttctaataattattgggaattaagaagacgtagacccaagttaaagaagctaaagaaacttttgatggaaaatccatatgaaggacctgacagtcaaaaagagaaggattcaaatagctcaaaatatacaactgaagatttgcttgatcaaattcaggcaagtgaggaagaaataatgacccaattacaagttctaaatgcctgtaagattggaggttattggaggattcttgaatttgattatgagatgaaacttctgaatcatgtaactcagcttgtggattctgaatcatggtcttttggtaaagttcctttgaacacatgccttcaggaactcggaccattggagccagaggaaatgatagaacactgtcttaaatgttatgggaagaaatatgtagatgaaggcgaagtttattttgagttggatgctgataaaatatgtagagcagcagcacgaatgctacttcagaatgcggtgaaattcaatctcgctgagtttcaagaagtgtggcagcagagtgttcctgaaggaatggtaactagtcttgatcagcttaagggtttagcgctggtggatagacactcgagaccagaaatcatatttttgctgaaagtagatgatttacctgaggataatcaggaacgttttaatagccttttctctctaagggagaagtggacagaagaagatattgctccatatattcaagatttgtgtggagagaagcaaaccataggtgcattactcactaaatattctcattcttcgatgcaaaatggtgttaaagtttataattcgagaagacccatttcttaaaagaacaacggtcttttcttcaggactcaagttgctttataaagttgctggatagaagaaaaataacttgtacttttatttctgacttttagaaacctagtcttctaaggcatttttctcctcatcttaagcattttgaaactactgttatttcttaaatgttataggatgtagctttaaaattatatttgtactatgtacacagtgtaaacaaggacaaaagaattctttcctatattatgtctgaggtctctatgatttatttaaagtttggctttttatatttaaaatgtcatttctttacttaggatttgatgttctaatcattaatacacttaagttttccagagaactaaatagtaatagtttcatagaagagaactatttattcacttaaatatcatttctcaagtgagtgagttcccctctacttttagccttccacccaaactggaagcctctaggtgctatcaattatttatatccatcgtttacatccatgaaattggctgaataattactcctctgcctggcgtagacatgcgctttgggaaaaaaacgagtttataatcctataatgaagaatactggcacaggcaatgctcactcgaaaacttcaagtaatttctagttggttttggaatgcttgataaagttcctttacagctttattttcctgatttgttttggtttagatcaaagttcaaattaattttaacttagctaatgaactcatcaccaggacagttggagggggtaggccgaggttaaatggtccacgtttcaaaaatgttaatggctaatccataattaaagaaggtttaactgttactgaagtttacaagttttattgtcatgaacatgaaatacaaacacgatggcttcgaaatgtctttcaataaatgtttctgcatttatatggattatatgatatatatacacagtctat

SEQ ID NO: 69 - DNA, 1030 bp, Homo sapiens
caaccctgccaggctctccaatcgcatgtggaattatcgctctacccaggcggtggtgtcgatctacgttccaattggggccgtaccatggcggagaagactcaaaagagtgtgaagattgctcctggagcagttgtatgtgtagaaagtgaaatcagaggagatgtaactatcggacctcggacagtgatccaccctaaagcaagaattattgcggaagccgggccaatagtgattggcgaagggaacctaatagaagaacaggcccttatcataaatgcttacccagataatatcactcctgacactgaagatccagaaccaaaacctatgatcattggcaccaataatgtgtttgaagttggctgttattcccaagccatgaagatgggagataataatgtcattgaatcaaaagcatatgtaggcagaaatgtaatattgacaagtggctgcatcattggggcttgttgcaacctaaatacatttgaagtcatccctgagaatacggtgatctatggtgcagactgccttcgtcgggtgcagactgagcgaccgcagccccagacactacagctggatttcttgatgaaaatcttgccaaattaccaccacctaaagaagactatgaaaggaagctcaactccagtaaagaactaagaacagtgtataacatgaagataacattttgtctttgaccactgtcttttgaatgggcccacagtgtttatgtactcttaacaactcacagaataatacatgttcactttattttgtaaaattgggttgagaggaaactaatggagtttcattgtaactgtcctttgtaatttatataaatgtattattttcctatatccttggttcttttctgataatttacagatttagcttttcttttgttatataaactgctagccacaaattttagttatgtaaaaggctacccttgacaagaaaagacatactgtcatgtatttatattctagcatagactaaactgaataaaaatgctgataacaggaccttt

SEQ ID NO: 70 - DNA, 4452 bp, Homo sapiens
caggctttccagatggctgcggcggtcggtcggtgaggctttcccggctgtggtttggctgcgggcggcttgggcagcccgcgggcgcctcaggtagaagaagaaaggtgccactccggcatgaagacagactcgcttagtcgccagtcacttaagctgagtgcattgtgatttccaataattgaggcagtggttctaaaagctgtctacattaatgaaaagagcaatgtggccagcttgactaagccgccagcgcacagcgcggcaggacgcgcccgggtctcagcggacttgtgcatgttagctgtgtagatttatgtgagggcttgtaaaactctggtcttgtaaactagtcttaagcgcttttaatatggagacagatgagagcccctctccgctcccgtgtgggcccgcaggagaagcggtgatggagagccgagctcgccccttccaagcgctgccccgtgagcagtctccaccacctcccctgcaaacgtccagtggtgcagaggtaatggacgttggctctggtggtgatggacagtccgaactccctgctgaggaccccttcaacttctacggagcttctcttctctccaaaggatccttctctaagggccgcctcctcatagacccgaactgtagtggccacagcccgcgcaccgcccggcacgcacctgcggtccggaagttctcccctgaccttaagttgcttaaggatgtaaagattagcgtgagctttaccgagagctgcaggagtaaggacaggaaggtgctgtacacaggagcagagcgcgacgtgcgggcggagtgcggtctgctccttagccctgtcagtggggacgtgcatgcttgtccctttggcgggagtgttggtgacggggtaggcatagggggtgagagtgctgataagaaggatgaggagaatgagctggatcaggaaaagagagtggagtatgcagtgctcgatgagttagaagattttactgacaatttggagctagatgaagaaggagcaggcgggttcacggctaaagcaatcgttcagagagacagagtggatgaagaggccttgaatttcccctacgaggatgactttgacaacgatgtggatgctctgctggaagaaggcctttgtgcccccaaaaagaggcgaacagaggaaaaatatggcggagacagcgaccatccgtccgatggagagacaagtgtgcagccgatgatgaccaagattaaaacagtgctcaaaagtcgtggccgcccacctacagagccgctgcccgacgggtggatcatgacattccataactctggagtcccggtgtacctacacagagagtctcgggtggtcacctggtccaggccatacttcttgggaacgggaagcatacggaaacacgaccctcctctgagtagcatcccttgtctgcattataagaaaatgaaggacaacgaggaacgggagcaaagcagtgacctcacccctagtggggatgtgtcccccgtcaagcccctgagccgatctgcagagctggagtttcccctggatgagcctgactctatgggtgctgacccggggcccccggacgagaaagacccactaggggctgaggcagcccctggggccctggggcaggtgaaggccaaagtcgaggtgtgcaaagatgaatccgttgatctcgaggaatttcgaagctacctggagaagcgttttgactttgagcaagttactgtgaaaaaattcaggacttgggctgagcggcggcaattcaatcgggaaatgaagcggaagcaggcggagtccgagaggcccatcttgccagccaatcagaagctcattactttatcagtgcaagatgcacccacaaagaaagagtttgttattaaccccaacgggaaatccgaggtctgcatcctgcacgagtacatgcagcgtgtcctcaaggtccgccctgtctataatttctttgaatgtgagaacccaagtgagccttttggtgcctcggtgaccattgatggtgtgacttacggatctggaactgcaagcagcaaaaaacttgcgaagaataaagctgcccgagctacactggaaatcctcatccctgactttgttaaacagacctctgaagagaagcccaaagacagtgaagaactcgagtattttaaccacatcagcatcgaggactcgcgggtctacgagctgaccagcaaggctgggctgttgtctccatatcagatcctccacgagtgccttaaaagaaaccatgggatgggtgacacgtctatcaagtttgaagtggttcctgggaaaaaccagaagagtgaatacgtcatggcgtgtggcaagcacacagtgcgcgggtggtgtaagaacaagagagttggaaagcagttagcctcacagaagatccttcagctgctgcacccacatgtcaagaactgggggtctttactgcgcatgtatggccgtgagagcagcaagatggtcaagcaggagacatcggacaagagtgtgattgagctgcagcagtatgccaagaagaacaagcccaacctgcacatcctcagcaagctccaagaggagatgaagaggctagctgaggaaagggaggagactcgaaagaagcccaagatgtccattgtggcgtccgcccagcctggcggtgagcccctgtgcaccgtggacgtgtgagggaggtggcacgggccagggcgcgggggccgccagccgcacttctgaggagaccagcagtcatgcatcgtgcaccacagtgtcaggcctccaacccacgctccttccctgtggccaacctgtgggcccggccttagggtggaggctttagtgtacagggacagccatggccacacagcacacatgtggagcagcggctctccctggaaagctccaggcctgaatggatggactcagcgactgcaccagtggcagctggtgactgtggacagtggtggaccctgcttctgtgcacctgctgcaggctctttttatgaaggctttcatgaattttagtatgtaatacgcactgacgacacatgatgcttggatgacagatgagaggggatggctgagtcctgtggctggcccgtgatgccaggtggcccatgtgcccagggcgcctgcagggctgctacagggacctggtcaggaggtgcacatggtgccctgccctcacccaccctctgtgtttccccttctttgaaaaggtagaagagaaaggaatattttaaacctttttggcttaaacagaattttagcatcagaactagctttctgggattggaggcaaaccatcaaggtggtccctctccagtctggacacgatgccagcaaggatgacgtcctgccacctcctggagttaccctggcctcctagggtccctttttctgatgaagtcttaattccctaaaagcgcctctttggacactgaggccctctctgcctttcctggcctccggcaacagttttttacaaagattttttgcagtcgagtccatatgtccacccattgatttttaaagcttttgtgatattttagcattttgaaagactttcacagtgagagtagaaggtagatttggaatcatgcattttagcaagtggacttgttgaaacaggaagcaagggccttcagtgtagcccattcttgatccagagctgttgcctgtgacagcggtttctctggatgtcaaaggcagctgcctggtgcccagcttgcttctcgactggtggcccctatgggtgggtgtgcgatggaaatgtgttcctgccggagtctgaggcaccagggtgtgctcaaaggctggccctggtggtggactggcacctgtgcagagtgccgtgtgcttgtggtgcgccatctgaagcaagagtccagcgttctgccgtgtctgtcccccaccatgccccctacaggcggtactgatggcgcttttttttttttttctgtcaggaaaacaatgttggcctgtgggccgcccacaacatatccttccctcactacctgtgtgaccaaggttggcttctgttgacctttaaaaaagaaaccctcaactcaaattgctataattagacacttgcttctgtcttgcctcctgtctgcagctgtgaatagtcatttgactgtgactgttgcccttagccagccagatgcgcctgtgaaccaaagcttcgtgcacatgtgttcccctaaaggttggggagcctcgctgtgtcttgctgttcccaggcaccaccacagcaggtgctgccatactcttgtggtctctgtgcgccccccccccccccccacccgtctgccaagcatgggtatgaatcgtgcacacagccatgcttcaaggccggggcaggggagcctgtgctgatgccatccagggcactgggctgtgcctggaaggcgagccttgattgtctgaacacataaagcaaactgtcc

SEQ ID NO: 71 - DNA, 4335 bp, Homo sapiens
gagggccctctttgtggctgcagttggcaagatggcgccggtgggggtggagaagaagctgctgctaggtcccaacgggcccgcggtggcggccgccggcgacctgaccagtgaggaggaggaaggccagagcctatggtcctccattctgagcgaagtgtccacccgcgccaggtccaagctgccgtccggcaagaacatcctggtcttcggtgaagatggttctggtaaaacaaccctcatgactaaactacaaggagctgagcatggcaaaaaaggaagaggcctagaatatctctacctcagtgtccatgatgaggaccgagatgatcacacgcgctgcaacgtgtggattctggatggagacttgtaccacaaaggcctgctgaaatttgcagtttctgctgaatccttgccagagaccctcgtcatttttgttgcagacatgtctagaccttggactgtgatggaatctctgcagaaatgggctagtgttttacgtgagcacattgataaaatgaaaattccaccagaaaaaatgagggagctggaacggaagtttgtgaaagattttcaagactatatggaacctgaagaaggttgtcaaggttccccacagagaagaggccctctgacctcaggctccgatgaagaaaatgttgccctgcctctgggtgacaatgtgctgactcataacctggggatcccggtgttggtggtgtgcacaaagtgtgatgcggtgagtgtcctggagaaggagcacgattacagggatgagcatttggactttatccagtcacacctgcggaggttctgccttcagtatggagctgccttgatttacacatcagtgaaagaagagaaaaacctcgacttgttgtataagtatattgttcataaaacatacggtttccacttcaccacacctgccttagttgtggaaaaggatgccgtttttatacctgcaggctgggacaatgaaaagaaaatagctattttacatgaaaattttacaaccgtgaagccggaagatgcatatgaagactttattgtgaaacctcccgtgagaaagctggtccacgacaaagagttggcagcagaagatgagcaggtgttcctaatgaagcaacagtcactccttgccaagcaaccagccactcccacgagagcttctgaatctcctgcaagaggaccctctggctctccaaggacccagggtcggggagggccagccagtgtgcctagctcctccccaggcacgtcagtaaaaaagccggacccaaacatcaaaaataatgcagcaagtgaaggggtgttggccagcttcttcaacagtctgttgagtaaaaagacaggctctcctggaagtcctggtgctggtggggtgcagagcacagccaagaagtcaggacaaaagactgtgttgtcaaatgttcaggaagaactggatagaatgactcgaaagccagactctatggtaacaaactcttcaacagaaaatgaagcctgaacctccttaaaaagtgcatatgtcgaatgaccaaataactatgtatattgatctgctaagaccaggatttttctgatatggcacatgctatcagttttttggggcaggggagatgaactttaaaaaaaaaaaaaaaacttcattggcttgtccgagtgtgaaatgcacatttaggaaggttacatgtcagaccctttgttaaggataacccttggactctggggcatgtggctcttttgtgggaggcaagcacatctgggcttcttgtggaggggaaggtagagtgaaagaaagagggcccactttctaacagggtggagcaaatgagaccaagaaatcattggtaagatgatggttagtctgaccagtttcatgttagtaaattcacttgttcttgggaagcagattaagtagcagaaagtccaggaaagaaagaccagaaggagtaatgagacaagtgatggtggggaagctgaatgttgagggaggtggaggaaggaggagatgagcagtgtcagtaaatactgtgcattcagtagaagttgaagaatcattgttagaagcatttccaaacaaaacactaagcaaaatgggaattaggcttattttgaatgcatctttaacttacgaaagatgtactaattgtgggggtgcctgagtcaggcggagctgacccaggggtgggaacgatggcagctgcccaggacccatgtgcttggcccaggctatgtcctcgtgagaggtactggggtccacggatatgtgttgtggggcagacagtcactgtgggatgtcttcaaagtcagcagttacagaattagtttactttgaattttgttgtctaaatagctcctgctttattttttaaattaaattttttgtttttactatcacaggctggcctaactaatacaaaataggtgatgaacctctggttttaccataatgcaatgtgccacggaaagtttgggggaggtttttaatgtaattgcactctggttaattggctcgtaccaagccctgccttatgacttgtggaaagcttcaaggagttccactgatgcaaaagggtcttttcctagcttcctggtctgatcagtgctatgagatggacagataagtgtgaatgttttatacagaaaatggaaatgatacatttctcttgttaggtgttttcataaaatgtagcattttttttcttatggaaataagagtttcaggtgtctccccacctagggcaaattcatgcacattgtcatgttataccaccattctggaaatgatttctgtggatttgaaattgcacttttaattttatatatgacagcatttaaatgcaaacactaccatgaatttaatgtataaaatgttgtcaaaccaagggaaaaaaccacagttcaccatgtggagtttactttttttatatgaatgtttgttgtactgtgtctaagcataacttccctaatgtcattacttttacataccagatttgactgaccactaatgtagtactggggataacttaatatcctatgttgtgtcaagactctttgaagactttcttgaattgctttcgtaaaggtctgaacactgttaaggagaaagctgagtatcaacttgcctttctgatagaaatgtttcttgtgccagttttattgttgagatatactatttttttccttttttaattcagttttttaaaaaaacaaatgtattgtggcttccagttaccaggttgtctaggtaatgacagtaaactgactgtagaatgataattgtggtatagtgaccaatagatgccaaacagcttgtggcctcactaaaggtggggtcgcttagtccccgggagtaaaatgagtgacctcagaaacaagaattcctggaaaggcacatgccgaagaggaatatggtataattttaaattttaatgcaaaattttaatttgtctttattttttatcatttgaactgataagcactttttgtgtcaatataaaatatactaaaactgatgaaatgctaagacatgtcttgtgaaggaaggtttcttggagaccacttttatttactcatgagaagtggaagctcctagtatcagaagaagctgatacatagtgtcatgtgctcagtggttgccaaagtctaccaactttggggagctgcagggttctttttgggaggtgggaggaagggagatgagttttgttattttggggttttcaagcattggaaccaaaggccaaataataaacagcctttagtttttaaagtaaaattcattttatttgcagagtacacttgtatggtagactgttaaagacaattttatgactatttatgcacattataatggttacatctgctttttgtctttaaaataaaaaaaaaaatcagagaaaagcccacctttgaatacgtggctgaagataacagccaagaattggtctttcctaaaaatgcaacagataatgctgctagattgttattttgtttgcacttttttttgattggcattttaaaatcggtatttaaactgaagacattgtcatgttttattaatttaacaaagttgaaagtgactgctctgtacatcatgaccttaacaatgttaatgctgtaagtgaaagttcactgtcgtctgtatactaaatttattggtgtttctaacttaaaagtaagactgcagattatcccccaccagccttagtccaggggtgtggctctgtccgggtgcagtatgcagtcatgtggaaccttgctttctagtcctgggaaaaaaagatgtctctaattactggcttcaataaacacgaatccagactgctt

SEQ ID NO: 72 - DNA, 5146 bp, Homo sapiens
gaacaagggagctggcgccgccagcagccgccgagctgggttgagccgctgggccgcgccgcgcgccgccgccgtctgggaggctcggcccggccgcccgagcaggccgcgcgcgggccgccgggcccgaggccagagccatgggcgagaccaagatcatctaccacttggatgggcaggagacgccgtaccttgtgaagctgcccctgcccgccgagcgcgtcaccttggcggactttaagggcgttttgcagcgacccagctataagttcttcttcaagtctatggacgacgatttcggagtggtgaaggaggagatctcggatgacaatgccaagctaccatgcttcaatggccgggtggtgtcctggctggtgtcagctgagggctcacacccagacccagcccccttctgtgctgataacccatcggagctgccaccacctatggagcgcacgggaggcatcggggactcccgacccccatccttccaccctcatgctggtgggggcagccaggagaacctggacaatgacacagagacggactctttggtgtctgcccagcgagagcggccacgccggagggatggcccagagcatgcaacccggctaaatggaactgcgaagggggaacggcggcgagaaccagggggttatgatagctcatccacccttatgagcagtgagctggagaccaccagcttctttgactcagatgaggatgactccaccagcaggttcagcagctccacagaacagagcagtgcctcacgcctgatgagaagacacaagcggcggcggcggaagcagaaggtttctcggattgagcggtcctcgtccttcagcagcatcacggactccaccatgtcactcaacatcatcacggtcactctcaacatggaaaaatataacttcttgggcatctccattgtgggccaaagcaacgagcgtggtgacggcggcatctacattggctctatcatgaagggtggggccgtggctgctgatggacgcatcgagccaggagatatgttgttacaggtaaacgagatcaactttgagaacatgagtaatgacgatgcagtccgggtactgcgggagattgtgcacaaaccggggcccatcaccctgactgtagccaagtgctgggacccaagtccacgtggttgcttcacattgcccaggagcgagcccatccggcccattgaccctgcggcctgggtctcccacactgcagccatgaccggcaccttccctgcatacggcatgagcccctccctgagcaccatcacctccaccagctcctccatcaccagttccatccctgacacagagcgcctagacgacttccacttgtccatccacagtgacatggctgccatcgtaaaagccatggcctcccctgaatcagggttggaggtccgtgaccgcatgtggctcaagattaccatccctaatgctttcatcggctcagatgtggtggactggctgtaccacaatgtggaaggcttcacggaccggagggaggcccgcaagtatgccagcaacctgctgaaagctggcttcatccgccataccgtcaacaagatcaccttctccgagcagtgctactacatcttcggtgacctctgcggcaacatggccaacctgtctctccacgatcacgatggctccagtggcgcctctgaccaggacacactggcccctttgccgcacccgggggccgccccttggcccatggctttcccgtaccagtacccgccacccccgcacccatacaacccgcacccgggcttcccggagctgggctacagctacggcgggggcagcgccagcagtcagcacagcgaaggcagtcggagcagtggctccaaccgtagcggcagcgatcggaggaaggagaaggacccgaaggccggggactccaagtccgggggcagcggcagcgaatcggaccacaccacacgcagcagcctgcgggggccgcgggagcgggcgcccagcgagcgctcagggccggcggccagcgagcacagccaccgcagccaccattccctggccagcagccttcgcagccaccacacacacccgagctacggtcctcccggagtgccccctctctacggcccccccatgctgatgatgcccccgccgcccgcggccatggggcccccaggagcccctccgggccgcgacctggcctcagtgcccccggaactgaccgccagcagacagtccttccgcatggccatgggaaaccccagtgagttctttgtggatgtgatgtgagcagggcccctcccccagctccattccgctcccaccccagccggctgcgttcctctctccatccgtccgtcttttttactttgtctggtacctgaaagggaaataaaaggaactaaatccaggtgcgctaactgctcgcagggtgctgcgagggtggggtgcacctaccgattggctctgcagccccctaacctgcctctggccccagttcgtttcctctgcccactaatccctgcgcaggacttcccaggaccccttttgtctctgggaccagacttgttggtgctaccccttactcccctctgcaacccccattttgggagttgaccccagcaatgaccttggtggcacgctcactccctcattctctcgtttcccctttagctccctttcaccatttattcagctacatcatccctctattaaccccaccccatcaggcacgtgtgcaaacctcttgactttaccccacattactgaaaccaaaatatatttgcttcatctgcccctactaaccatccccctgcctgctgcctcagtcctgcaacctaaagctgtagtcgcctccaatagccatccatgccatccctgcctgtgcctagatcagaggcccagagggccccctcagttgcctgagcagctggtggcttccagggagcatctctgctctacccctgccccatgcctgccctgcgtgctggttccttcagacccctaaccctactaaccagcaggctcatctcacctccaggcctgaaacatttcttttctttcttttttcctcccccaatttaccctgggcctggagcagccaagaatttcgggctgtttgactttctgtgagcccccagcgaggggaggcccagcctccgaggagaccaggaaccctgcttcagcagcccctcagggcttcccaaggatgtccagcccccacacccacacgttaacataatgagtcactaggcttctggggagggcccaacttcacccatgcatgagagactctcctcctttccagagagaatcggatcgcaccacgtgtggcagcctgcggcggggggaggggggcctctttagctctctttatctttctctctcactcatgtatgcatacatgcacagagatgcatacacaggtgcctatgcaagttcatttaagcctcagggctggtccctgcccaaagggctggaccctcctaatcctctcctaggttgtggggctggtcccctgacacccttctccccttcctggtagaccttaaacctcgcacacatgtccccagcattttctcacctggataaagcccataagctgggtctcaggctgggctcagcaaaggactcgccttgcaaccgacaggccattcccacccccacacacaacctcccctgttttcacattcaccatggcatcccagagcaaggacacaggagcccacaggccagttgaggttgggcaaggagacttccaggacttccagacagagtaccaggttttatttttcaccttattctctactttaaacaaatcataactttctctttaagcctctgctataaattctcctggctctcctgggcttccatattttgggggctggggtgtcaaaagtgagatgaagttcttagctccaggttttggggtaaaccaaggtaggaacattttggcatttatttcaattaacaatacttccttggacgggtgcggtggctcacgtctgtaatcccagcactttgggaggctgagacaggtggatcacttgaggtcgggagttcgagaccagcctggccaacatagcaaaaccctgtctctactaaaaatacaaaaattagatgggtgttttggcacctgcctgtaatctcagctactcaggaggctgaggcacaagaatcgcttgaatccaggaagcaagcggaggttgcagtgagttgagatcgcactccagcctgggtgacagagtgagattctgtctcaaaagcaaactaacaaagaaaaacaatacttcctggggttttggtgtgcagagggctttgttggaagtgtgactcaatcttgcctgccttctgggagctctagaattgttcccaacccagtccatggcttctagccaccactacagggctgtttcatgtacttctctctctgactctgtcttgtccgactctcttgagaatttctcaacgattgctcatgcctgtcagtatcagtgcttccatcgttccatctttgattcacttctctttcctttctatttactcccaaaatggagtcattcatcctgatgtcctcaattgctgctgatatgctggtgattcccaaatacatagctccaacccccaacttcccccagactttagatctgtattggtattacctactggacatctctatggacagttccgtatagactcaactcatctgcccaaccaagtatgttcctcctgaattcctctcctggttacttcatcacaatctacataggctcaccagctagaaacatttatgagcttacattccttcttcccatatcttatcagcatatcatatccatttcactccaacactctgtcttgaatttggccctccctctcccctctctactttaattcattggagcatgggatttggagttaggtggttttgggtttgaattccagctctactatttttggttgtgtgatagagttatttaacctctctgagcctcagttccctcgtatgtaaaatgatgataataatacctacctcacagggttgttgtgaggatttaaattagatattgtacgaaaagtgcctagcacagtgcctggcacacagtagagtaggtgctcaataaatggtagctattattatt

SEQ ID NO: 73 - DNA, 6159 bp, Homo sapiens
cgcgggggcgcgcgcgcgcgggcccgggagaggctcccgagccaggcggtcttcggtcctcgcagcgcttccagctccccgcgcccctatgtgagggagacggggaggcccgcggcgcgcaggggagggcgaggcatgtgcacgggccggagggtgctgcagccgcccgaggaagaggaggacggcggcgaggaggagagcggggggctcgcggcggcgggccccggccgaggggatgcagtggactgtgtgtgtctggctgtagcagacgcgaggcggcgacgaggcgccggggacccgcgcgaggggcggccgggaggcggcggcggcggccgccagaagtagcagcaggaccggcggcggcgacggcagccctgaaatgcattttcctctccagcggccatgttaaccaggaaaccttcggccgccgctcccgccgcctacccgaccggccgaggtggggacagcgccgttcgtcagcttcaggcttccccggggctcggtgcaggggccacccggagcggagtggggactggcccgccctcccccatcgccctgccgcctctccgggccagcaacgctgccgccgcagcccacacgattggcggcagtaagcacacaatgaatgatcacctgcatgtcggcagccacgctcacggacagatccaggttcaacagttgtttgaggataacagtaacaagcggacagtgctcacgacacaaccaaatgggcttacaacagtgggcaaaacgggcttgccagtggtgccagagcggcagctggacagcattcatagacggcaggggagctccacctctctaaagtccatggaaggcatggggaaggtgaaagccacccccatgacacctgaacaagcaatgaagcaatacatgcaaaaactcacagccttcgaacaccatgagattttcagctaccctgaaatatatttcttgggtctaaatgctaagaagcgccagggcatgacaggtgggcccaacaatggtggctatgatgatgaccagggatcatatgtgcaggtgccccacgatcacgtggcttacaggtatgaggtcctcaaggtcattgggaaggggagctttgggcaggtggtcaaggcctacgatcacaaagtccaccagcacgtggccctaaagatggtgcggaatgagaagcgcttccaccggcaagcagcggaggagatccgaatcctggaacacctgcggaagcaggacaaggataacacaatgaatgtcatccatatgctggagaatttcaccttccgcaaccacatctgcatgacgtttgagctgctgagcatgaacctctatgagctcatcaagaagaataaattccagggcttcagtctgcctttggttcgcaagtttgcccactcgattctgcagtgcttggatgctttgcacaaaaacagaataattcactgtgaccttaagcccgagaacattttgttaaagcagcagggtagaagcggtattaaagtaattgattttggctccagttgttacgagcatcagcgtgtctacacgtacatccagtcgcgtttttaccgggctccagaagtgatccttggggccaggtatggcatgcccattgatatgtggagcctgggctgcattttagcagagctcctgacgggttaccccctcttgcctggggaagatgaaggggaccagctggcctgtatgattgaactgttgggcatgccctcacagaaactgctggatgcatccaaacgagccaaaaattttgtgagctccaagggttatccccgttactgcactgtcacgactctctcagatggctctgtggtcctaaacggaggccgttcccggagggggaaactgaggggcccaccggagagcagagagtgggggaacgcgctgaaggggtgtgatgatccccttttccttgacttcttaaaacagtgtttagagtgggatcctgcagtgcgcatgaccccaggccaggctttgcggcacccctggctgaggaggcggttgccaaagcctcccaccggggagaaaacgtcagtgaaaaggataactgagagcaccggtgctatcacatctatatccaagttacctccaccttctagctcagcttccaaactgaggactaatttggcgcagatgacagatgccaatgggaatattcagcagaggacagtgttgccaaaacttgttagctgagctcacgtcccctgatgctggtaacctgaaagatacgacattgctgagccttactgggttgaaaaggagtagctcagacctgtttttatttgctcaataactctactcatttgtatcttttcagcacttaattttaatgtaagaaagttgttcattttgtttttataaaatacatgaggacaatgctttaagtttttatactttcagaaactttttgtgttctaaaagtacaatgagccttactgtatttagtgtggcagaataataacatcagtggcaggccactgattacttcatgactgccacgcatttacagattggtgtcaaagacattcactatgtttttatggttcatgttatatcctccccagggtgacagccccttaaggccctccttttccctccatgctccaggtccatgcacaggtgtagcatgtcctgcttccgtttttcataaattaatctgggtgttgggggtagtgggaggagaacggtcagaatcaaagtgacattctaagaaaaactgtaccttagagattttcctctagtgctcaaacaaatacaaaataagatccccaaggtttaaactgcccagttagcattctgacattctaaaagccggcaaagcagcttttagtggataaatgggaatggaaacgtgtgtgttcctccaaattttctagtatgatcggtgagctgttttgtaaagaagcctcatattacagagttgcttttgcacctaaatttagaattgtattccatgaactgttcctcccttttctctgcttttctcctctctgttcctcttttaataccacacgtctgttgcttgcatttagtttgtcttcttccttcagctgtgtatcccagactgttaatacagaaaagagacatttcagctgtgattatgaccattgtttcatattccaattaaaaaaagaacagcagcctagctacttaaggtggggatttccatagttccaaagaagatttagcagattagagtgagttcacacttttcaggtgccactgtaaggttctctcagcctgggaaactatcaactctttctttaaaaagaaagagggttgaaaatcctctggacgaacagaagtcactttggctgttcagtaaggccaatgttaacaacacgtttagaggaggaaaagttcaacctcaagttaaatggtttgacttattcttcgtatcattagaagaaccccagagatagcattcctctattttattttactttcttttggattgcactgattgtttttgtgggaatgacactttatctggcaaagtaactgagagtttggtaaaagaatattttcttctctgaataataattattttcacagtgaaaatttcagtattttatcactaatgtatgagcaatgatctatatcaatttcaaggcacgtgaaaaaaattttttagtatgtgcaatttaatatagaaagatttctgcctgtttggacaataggttttgggtagtacagattaggataagtaagcttatatatgcacagagattattgtattacctgtaaattgatttacaagtacttaaaagcgtggtccccagtgaggccaagaaagtttccggttaagttctttaataataatcctacagtttatcttaagaaaaaaaaaaaggtttgaaaaaaacactttaatttaggcttcgttggttgatggtggaaaaaaatgctcaggaaatatttcagatatttgccaaaaaaccagtaataaggttaccttattaaaatagtgatatttgctttactatttaaggtgtcactgataaattaatttgtacttctgtgtttagaaattatagcttcttttcccttagtcaaattttttagcatattatacacatttctgtgtaatctgtggaagtgcaataatatgttagtaagttacattttaaataatgctcatgtgacaatactcccaatcaatggcttatagaatttaaagatctgtatattagattttggcttaaaggcatgagaagtataagacttggtttggtggctttgtaagaccaccagcctcttaatgatggttagcttctttaggtcattaaatcaataaaaacatataatgctgttttgctcttctaatgctcctcttccatttccagttatcttcacatttacatttaaatatacaaacctgagcctgccattattaatttccctataaaatgacgatacatgtgaacatttataaatggactaatactgcttgtctttcccccaccgcacaaaactggttcttaagatgccagcaatgaatttgagactatctttatttataaatggaaaccggaaacttttataccaaactataataatgtgcagcactgtagggcttttttttttttccctccaaatacagtgaaatttttttattcacaagagctgccacatctcagcatttagtaatagagctgctttaataaaattctagtttgattgtcatgtcaaaaaaagaaaaatgttgcatctttgtgattttaaaacataaattaatgaaggctctgataggctattaggagttggcttggaaacagtttttggtctcacaggttaccattgtttggggatgtctgagctgttttcagatctaggaatagcacagtgttgtcttgtctttggcagtctcatttggctctgtttcttgcaccaccagcgtgttcattaccacttaaatatattgctacagcagtggaacaacagagtggtgcaagacactgtagattaacggtagaggagaaattgtgcccttagtgttaacaatgtgccttttgttctgaatgccatgttgtagggcatgcattttttggcctctttaactcttcgaattctagtcagtaagaatggaacccatctctgcaaagatacatctgtcttaaatatctagttacaggccttaatagaaaccataaggcatgactcatcttcaggcactgaaaaaagataaccatcaggtagtgttacacaaggacttcctatatttaaggggttaaagatggtctttgttgtatcttaacatcagactgatttttacattttttttttgttatgctaacactagacaaaaatcaactgtatttgtaaaaatttacctcaaaccatttaattttatagtgtgattaatcccagggcatttggtatgaaccaaagtgcattccttttatatgtgcctggctctagtaaggatggccagggatttttacaatttgggtgcaaggcacttaagccacttttaaacttaatgggtggtttggggtcgtgttaaatgactccatcagaatgttagaaaacactttaggcatcagtagcattgggccatattggaatcctaaagtgtgaattattttaaggagagcattcatttttgtaatttttttcatcaaaaatatttctggtaagcagaagactttttaaaaaaactgatctggtctcggtaaaggttttaatattgcccaacataatgctgtaatagcattaaaaaaagtatttgtgaactctgtttcttaggggcttgtacatctctctgctatggacatacataaaattaattgtaattatactcagctcaactgctacagttctgtctaggcagtggcttgggtttttatcgagcaacaacttagacacgtgactgtaatatgctgcaactgtgtgtactgaaaatatgtgaaaatggttgaatgtggactgtgtatatatgtatgtaaaaatttctgtgagatgctgctgtcgccacttaacattaaatatgttctagtggattttaatcctagtggccagttctatgatactgtatgtattatacagctgatgacaggagtaagactgtttagtgaatatctgttaaattttattgttgtggccagagataatttcagaataaaattttaatgtcctacctta

SEQ ID NO: 74 - DNA, 7004 bp, Homo sapiens
gcggccgccgcccagccaggtgcaaaatgccgtgtcattgggagactccgcagccggagcattagattacagctcgacggagctcgggaagggcggcgggggtggaagatgagcagaagcccctgttctcggaacgccggctgacaagcggggtgagcgcagccggggcggggacccagcctagcccactggagcagccgggggtggcccgttcccctttaagagcaactgctctaagccaggagccagagattcgagccggcctcgcccagccagccctctccagcgaggggacccacaagcggcgcctcggccctcccgacctttccgagccctctttgcgccctgggcgcacggggccctacacgcgccaagcatgctgagggtcttcatcctctatgccgagaacgtccacacacccgacaccgacatcagcgatgcctactgctccgcggtgtttgcaggggtgaagaagagaaccaaagtcatcaagaacagcgtgaaccctgtatggaatgagggatttgaatgggacctcaagggcatccccctggaccagggctctgagcttcatgtggtggtcaaagaccatgagacgatggggaggaacaggttcctgggggaagccaaggtcccactccgagaggtcctcgccacccctagtctgtccgccagcttcaatgcccccctgctggacaccaagaagcagcccacaggggcctcgctggtcctgcaggtgtcctacacaccgctgcctggagctgtgcccctgttcccgccccctactcctctggagccctccccgactctgcctgacctggatgtagtggcaggcgggggacagagccgggccgagacttggtccctgctcagtgacagcaccatggacacgagatactctggaaagaagtggccggcccccacggacacaggaggagaggaagacacagaggaccagggactcactggagatgaggcggagccattcctggatcaaagcggaggcccgggggctcccaccaccccaaggaaactaccttcacgtcctccgccccactaccccgggatcaaaagaaagcgaagtgcgcctacatctagaaagctgctgtcagacaaaccgcaggatttccagatcagggtccaggtgatcgaggggcgccagctgccgggggtgaacatcaagcctgtggtcaaggttaccgctgcagggcagaccaagcggacgcggatccacaagggaaacagcccactcttcaatgagactcttttcttcaacttgtttgactctcctggggagctgtttgatgagcccatctttatcacggtggtagactctcgttctctcaggacagatgctctcctcggggagttccggatggacgtgggcaccatttacagagagccccggcacgcctatctcaggaagtggctgctgctctcagaccctgatgacttctctgctggggccagaggctacctgaaaacaagcctttgtgtgctggggcctggggacgaagcgcctctggagagaaaagacccctctgaagacaaggaggacattgaaagcaacctgctccggcccacaggcgtagccctgcgaggagcccacttctgcctgaaggtcttccgggccgaggacttgccgcagatggacgatgccgtgatggacaacgtgaaacagatctttggcttcgagagtaacaagaagaacttggtggacccctttgtggaggtcagctttgcggggaaaatgctgtgcagcaagatcttggagaagacggccaaccctcagtggaaccagaacatcacactgcctgccatgtttccctccatgtgcgaaaaaatgaggattcgtatcatagactgggaccgcctgactcacaatgacatcgtggctaccacctacctgagtatgtcgaaaatctctgcccctggaggagaaatagaagtggatgactacctgggcttcctccccacttttgggccctgctacatcaacctctatggcagtcccagagagttcacaggcttcccagacccctacacagagctcaacacaggcaagggggaaggtgtggcttatcgtggccggcttctgctctccctggagaccaagctggtggagcacagtgaacagaaggtggaggaccttcctgcggatgacatcctccgggtggagaagtaccttaggaggcgcaagtactccctgtttgcggccttctactcagccaccatgctgcaggatgtggatgatgccatccagtttgaggtcagcatcgggaactacgggaacaagttcgacatgacctgcctgccgctggcctccaccactcagtacagccgtgcagtctttgacgggtgccactactactacctaccctggggtaacgtgaaacctgtggtggtgctgtcatcctactgggaggacatcagccatagaatcgagactcagaaccagctgcttgggattgctgaccggctggaagctggcctggagcaggtccacctggccctgaaggcgcagtgctccacggaggacgtggactcgctggtggctcagctgacggatgagctcatcgcaggctgcagccagcctctgggtgacatccatgagacaccctctgccacccacctggaccagtacctgtaccagctgcgcacccatcacctgagccaaatcactgaggctgccctggccctgaagctcggccacagtgagctccctgcagctctggagcaggcggaggactggctcctgcgtctgcgtgccctggcagaggagccccagaacagcctgccggacatcgtcatctggatgctgcagggagacaagcgtgtggcataccagcgggtgcccgcccaccaagtcctcttctcccggcggggtgccaactactgtggcaagaattgtgggaagctacagacaatctttctgaaatatccgatggagaaggtgcctggcgcccggatgccagtgcagatacgggtcaagctgtggtttgggctctcagtggatgagaaggagttcaaccagtttgctgaggggaagctgtctgtctttgctgaaacctatgagaacgagactaagttggcccttgttgggaactggggcacaacgggcctcacctaccccaagttttctgacgtcacgggcaagatcaagctacccaaggacagcttccgcccctcggccggctggacctgggctggagattggttcgtgtgtccggagaagactctgctccatgacatggacgccggtcacctgagcttcgtggaagaggtgtttgagaaccagacccggcttcccggaggccagtggatctacatgagtgacaactacaccgatgtgaacggggagaaggtgcttcccaaggatgacattgagtgcccactgggctggaagtgggaagatgaggaatggtccacagacctcaaccgggctgtcgatgagcaaggctgggagtatagcatcaccatccccccggagcggaagccgaagcactgggtccctgctgagaagatgtactacacacaccgacggcggcgctgggtgcgcctgcgcaggagggatctcagccaaatggaagcactgaaaaggcacaggcaggcggaggcggagggcgagggctgggagtacgcctctctttttggctggaagttccacctcgagtaccgcaagacagatgccttccgccgccgccgctggcgccgtcgcatggagccactggagaagacggggcctgcagctgtgtttgcccttgagggggccctgggcggcgtgatggatgacaagagtgaagattccatgtccgtctccaccttgagcttcggtgtgaacagacccacgatttcctgcatattcgactatgggaaccgctaccatctacgctgctacatgtaccaggcccgggacctggctgcgatggacaaggactctttttctgatccctatgccatcgtctccttcctgcaccagagccagaagacggtggtggtgaagaacacccttaaccccacctgggaccagacgctcatcttctacgagatcgagatctttggcgagccggccacagttgctgagcaaccgcccagcattgtggtggagctgtacgaccatgacacttatggtgcagacgagtttatgggtcgctgcatctgtcaaccgagtctggaacggatgccacggctggcctggttcccactgacgaggggcagccagccgtcgggggagctgctggcctcttttgagctcatccagagagagaagccggccatccaccatattcctggttttgaggtgcaggagacatcaaggatcctggatgagtctgaggacacagacctgccctacccaccaccccagagggaggccaacatctacatggttcctcagaacatcaagccagcgctccagcgtaccgccatcgagatcctggcatggggcctgcggaacatgaagagttaccagctggccaacatctcctcccccagcctcgtggtagagtgtgggggccagacggtgcagtcctgtgtcatcaggaacctccggaagaaccccaactttgacatctgcaccctcttcatggaagtgatgctgcccagggaggagctctactgcccccccatcaccgtcaaggtcatcgataaccgccagtttggccgccggcctgtggtgggccagtgtaccatccgctccctggagagcttcctgtgtgacccctactcggcggagagtccatccccacagggtggcccagacgatgtgagcctactcagtcctggggaagacgtgctcatcgacattgatgacaaggagcccctcatccccatccagcttgcagacggtctgtcgagcttggcccccactaacacggcttctcctccatccagtcctcatgaggaagagttcatcgattggtggagcaaattctttgcctccataggggagagggaaaagtgcggctcctacctggagaaggattttgacaccctgaaggtctatgacacacagctggagaatgtggaggcctttgagggcctgtctgacttttgtaacaccttcaagctgtaccggggcaagacgcaggaggagacagaagatccatctgtgattggtgaatttaagggcctcttcaaaatttatcccctcccagaagacccagccatccccatgcccccaagacagttccaccagctggccgcccagggaccccaggagtgcttggtccgtatctacattgtccgagcatttggcctgcagcccaaggaccccaatggaaagtgtgatccttacatcaagatctccatagggaagaaatcagtgagtgaccaggataactacatcccctgcacgctggagcccgtatttggaaagatgttcgagctgacctgcactctgcctctggagaaggacctaaagatcactctctatgactatgacctcctctccaaggacgaaaagatcggtgagacggtcgtcgacctggagaacaggctgctgtccaagtttggggctcgctgtggactcccacagacctactgtgtctctggaccgaaccagtggcgggaccagctccgcccctcccagctcctccacctcttctgccagcagcatagagtcaaggcacctgtgtaccggacagaccgtgtaatgtttcaggataaagaatattccattgaagagatagaggctggcaggatcccaaacccacacctgggcccagtggaggagcgtctggctctgcatgtgcttcagcagcagggcctggtcccggagcacgtggagtcacggcccctctacagccccctgcagccagacatcgagcaggggaagctgcagatgtgggtcgacctatttccgaaggccctggggcggcctggacctcccttcaacatcaccccacggagagccagaaggtttttcctgcgttgtattatctggaataccagagatgtgatcctggatgacctgagcctcacgggggagaagatgagcgacatttatgtgaaaggttggatgattggctttgaagaacacaagcaaaagacagacgtgcattatcgttccctgggaggtgaaggcaacttcaactggaggttcattttccccttcgactacctgccagctgagcaagtctgtaccattgccaagaaggatgccttctggaggctggacaagactgagagcaaaatcccagcacgagtggtgttccagatctgggacaatgacaagttctcctttgatgattttctgggctccctgcagctcgatctcaaccgcatgcccaagccagccaagacagccaagaagtgctccttggaccagctggatgatgctttccacccagaatggtttgtgtccctttttgagcagaaaacagtgaagggctggtggccctgtgtagcagaagagggtgagaagaaaatactggcgggcaagctggaaatgaccttggagattgtagcagagagtgagcatgaggagcggcctgctggccagggccgggatgagcccaacatgaaccctaagcttgaggacccaaggcgccccgacacctccttcctgtggtttacctccccatacaagaccatgaagttcatcctgtggcggcgtttccggtgggccatcatcctcttcatcatcctcttcatcctgctgctgttcctggccatcttcatctacgccttcccgaactatgctgccatgaagctggtgaagcccttcagctgaggactctcctgccctgtagaaggggccgtggggtcccctccagcatgggactggcctgcctcctccgcccagctcggcgagctcctccagacctcctaggcctgattgtcctgccagggtgggcagacagacagatggaccggcccacactcccagagttgctaacatggagctctgagatcaccccacttccatcatttccttctcccccaacccaacgcttttttggatcagctcagacatatttcagtataaaacagttggaaccaca

SEQ ID NO: 75 - DNA, 2592 bp, Homo sapiens
aggcgcatttccaacgcttggaggagagggcggggtgtcgtttcctttcgctgatgcaagagcctagtgcggtggtgggagaggtatcggcaggggcagcgctgccgccggggcctggggctgacccgtctgacttcccgtccgtgccgagcccactcgagccgcagccatgtctggggacgagatgatttttgatcctactatgagcaagaagaaaaagaagaagaagaagccttttatgttagatgaggaaggggatacccaaacagaggaaacccagccttcagaaacaaaagaagtggagccagagccaactgaggacaaggatttggaagctgatgaagaggacactaggaaaaaagatgcttctgatgatctagatgacttgaacttctttaatcaaaagaaaaagaagaaaaaaactaaaaagatatttgatattgatgaagctgaagaaggtgtaaaggatcttaagattgaaagtgatgttcaagaaccaactgaaccagaggatgaccttgacattatgcttggcaataaaaagaagaaaaagaagaatgttaagttcccagatgaggatgaaatactagagaaagatgaagctctagaagatgaagacaacaaaaaagatgatggtatctcattcagtaatcagacaggccctgcttgggcaggctcagaaagagactacacatacgaggagctgctgaatcgagtgttcaacatcatgagggaaaagaatccagatatggttgctggggagaaaaggaaatttgtcatgaaacctccacaagtcgtccgagtaggaaccaagaaaacttcttttgtcaactttacagatatctgtaaactattacatcgtcagcccaaacatctccttgcatttttgttggctgaattgggtacaagtggttctatagatggtaataaccaacttgtaatcaaaggaagattccaacagaaacagatagaaaatgtcttgagaagatatatcaaggaatatgtcacttgtcacacatgccgatcaccggacacaatcctgcagaaggacacacgactctatttcctacagtgcgaaacttgtcattctagatgttctgttgccagtatcaaaaccggcttccaggctgtcacgggcaagcgagcacagctccgtgccaaagctaactaatttgctaatcactgattttgcaaagcttgttgtggagatgtggctggacaggtttgccatcagagtggatataccgttgtattaaaaacaagataaaaaagctgccaagatttttggcgagtggttggtctgaagtccttgcaagacgctgatgctcaagctgttgacatactcattgcctactttaacacctgtcagagaaacgtgatatggggtaaggaggtgcttttttaaaatcgttcatagacttctgtaaaatgcaagataaattaaagttattataacagtgattctttcaatttggtttgtccttcagttttcttttctataaatgtgcttggtgaaatcagcaagaaaccaaccatataaaacagtgtgtgccgggctctgactgagaaactgaacaatggcaggcgcttcatctgggcagccatttttcttctctgcttctcttgagatacatagttaaagtagacacggcctcccacgcgagtgtggtgggaccttgagacttaggaggattgcctgttttcagtgtccagggaatgactccatagatttgaattcttttccgtatgtggggatggttgctactacctcaccgccaagtcctcccccagctgttaccacatgagggaatacaaggtgctaggtaccctccttcctcgttggccactaagaggtcttagaaacatagcctgtaaatgtgtcttgtaactggcacactaaaaaagatcctagttgagcatctctcttggtgaggaagcgatgtgtgtgcggttcaggaaactcctccaagaggaggaggagtccaaacagggatgccagaggaagctttccgttttcctagccaacttgtgttctgggtttgaaaaagacccaccacaaatgctttttctattttctgatttaaaagtcgcttttgaatatgaccatgagaaaccaagaaatgctgcttgtgtggtgctctgcttcctgaggatttggctggaaggggattctccgctggcacatgggagaaggccatcttctgtgtcggtgctgtgatctgccttgttctcacttgctgaggataagggcatacacgctgctcctcgctttcttgttgcccgacttcgtactaagcagctcaggagcagtcactcagacccaaatgtcttgactgtgttgtttttaatcactgtgacccttaaagtacaggccaagtgttgtcaaacaccttggctaaaacagtggagggtgatgggtaaagcagtagagggccctcaacccacacactggctgaaactgccaccaactgccacgatgaacccaactgctgtttatgcccccattttcctttttttgtatctacacccacacgattcccaatgttggatatttctacatgaataaagcaaggatcagtgcctcttatgtaa

SEQ ID NO: 76 - DNA, 1977 bp, Homo sapiens
cttttcagtcgggcgctgagtggtttttcggatcatgtctggtggctccgcggattataacagagaacatggcggcccagagggaatggaccccgatggtgtcatcgagagcaactggaatgagattgttgataactttgatgatatgaatttaaaggagtctctccttcgtggcatctatgcttacggttttgagaagccttccgctattcagcagagagctattattccctgtattaaagggtatgatgtgattgctcaagctcagtcaggtactggcaagacagccacatttgctatttccatcctgcaacagttggagattgagttcaaggagacccaagcactagtattggcccccaccagagaactggctcaacagatccaaaaggtaattctggcacttggagactatatgggagccacttgtcatgcctgcattggtggaacaaatgttcgaaatgaaatgcaaaaactgcaggctgaagcaccacatattgttgttggtacacccgggagagtgtttgatatgttaaacagaagatacctttctccaaaatggatcaaaatgtttgttttggatgaagcagatgaaatgttgagccgtggttttaaggatcaaatctatgagattttccaaaaactaaacacaagtattcaggttgtgttgctttctgccacaatgccaactgatgtgttggaagtgaccaaaaaattcatgagagatccaattcgaattctggtgaaaaaggaagaattgacccttgaaggaatcaaacagttttatattaatgttgagagagaggaatggaagttggatacactttgtgacttgtacgagacactgaccattacacaggctgttatttttctcaatacgaggcgcaaggtggactggctgactgagaagatgcatgccagagacttcacagtttctgctctgcatggtgacatggaccagaaggagagagatgttatcatgagggaattccggtcagggtcaagtcgtgttctgatcactactgacttgttggctcgcgggattgatgtgcaacaagtgtctttggttataaattatgatctacctaccaatcgtgaaaactatattcacaggagtcgatagcagcagttggtgacgagatggcactcagaaacggcgttgacgtaatttaggacgtggaatcataagcgaaacagcacactgtttgaataaagagcgaaattggcagagggggtcgatttgggaggaaaggtgtggctataaactttgttactgaagaagacaagaggattcttcgtgacattgagactttctacaatactacagtggaggagatgcccatgaatgtggctgaccttatttaattcctgggatgagagttttggatgcagtgctcgctgttgctgaataggcgatcacaacgtgcattgtgcttctttctttgggaatatttgaatcttgtctcaatgctcataacggatcagaaatacagattttgatagcaaagcgacgttagtcgtgagctcttgtgaggaaagtcattggctttatcctctttagagttagactgttggggtgggtataaaagatggggtctgtaaaatctttctttcttagaaatttatttcctagttctgtagaaatggttgtattagatgttctctatcatttaataatatacttgtggactaaaagatataagtgctgtataaaatcagccaattatgttaaactagcatatctgcctttattgtgtttgtcattagcctgagtagaaaggcctttaaaatttttttagaaagcatttgaatgcattttgtttggtattgtatttattcaataaagtatttaattagtgctaagtgtgaactggaccctgttgctaagccccagcaagcaatcctaggtagggtttaatccccagtaaaattgccatattgcacatgtcttaatgaagtttgaatgttaaataaatt

SEQ ID NO: 77 - DNA, 3785 bp, Homo sapiens
ctgtctgagcatttcactgcggagcctgagcgcgcctgcctgggaaaacactgcagcggtgctcggactcctcctgtccagcaggaggcgcggcccggcagctcccgcatgcgcagtgcgctcggtgtcagacggcccggatcccggttaccggcccctcgctcgctgctcgccagcccagactcggccctggcagtggcggctggcgattcggaccgatccgacctgggcggaggtggcccgcgccccgcggcatgagccggtgaccaagctcggggccgagcgggaggcagccgtggccgagccacagggatctgattcctcccagggggatgtcctgcgcctcagggtccggtggtggcctgcggcatcccttgcggtgccagaagccgtgggacgagtgtcatttgccatcctaaatacttggtttttcttatttctctccctggtgaccaggagtgtgaggaagaggctgtctgtgtcattatgtgtgcgtcggtcaagtataatatccggggtcctgccctcatcccaagaatgaagaccaagcaccgaatctactatatcaccctcttctccattgtcctcctgggcctcattgccactggcatgtttcagttttggccccattctatcgagtcctcaaatgactggaatgtagagaagcgcagcatccgtgatgtgccggttgttaggctgccagccgacagtcccatcccagagcggggggatctcagttgcagaatgcacacgtgttttgatgtctatcgctgtggcttcaacccaaagaacaaaatcaaggtgtatatctatgctctgaaaaagtacgtggatgactttggcgtctctgtcagcaacaccatctcccgggagtataatgaactgctcatggccatctcagacagtgactactacactgatgacatcaaccgggcctgtctgtttgttccctccatcgatgtgcttaaccagaacacactgcgcatcaaggagacagcacaagcgatggcccagctctctaggtgggatcgaggtacgaatcacctgttgttcaacatgttgcctggaggtcccccagattataacacagccctggatgtccccagagacagggccctgttggctggtggcggcttttctacgtggacttaccggcaaggctacgatgtcagcattcctgtctatagtccactgtcagctgaggtggatcttccagagaaaggaccaggtccacggcaatacttcctcctgtcatctcaggtgggtctccatcctgagtacagagaggacctagaagccctccaggtcaaacatggagagtcagtgttagtactcgataaatgcaccaacctctcagagggtgtcctttctgtccgtaagcgctgccacaagcaccaggtcttcgattacccacaggtgctacaggaggctactttctgtgtggttcttcgtggagctcggctgggccaggcagtattgagcgatgtgttacaagctggctgtgtcccggttgtcattgcagactcctatattttgcctttctctgaagttcttgactggaagagagcatctgtggttgtaccagaagaaaagatgtcagatgtgtacagtattttgcagagcatcccccaaagacagattgaagaaatgcagagacaggcccggtggttctgggaagcgtacttccagtcaattaaagccattgccctggccaccctgcagattatcaatgaccggatctatccatatgctgccatctcctatgaagaatggaatgaccctcctgctgtgaagtggggcagcgtgagcaatccactcttcctcccgctgatcccaccacagtctcaagggttcaccgccatagtcctcacctacgaccgagtagagagcctcttccgggtcatcactgaagtgtccaaggtgcccagtctatccaaactacttgtcgtctggaataatcagaataaaaaccctccagaagattctctctggcccaaaatccgggttccattaaaagttgtgaggactgctgaaaacaagttaagtaaccgtttcttcccttatgatgaaatcgagacagaagctgttctggccattgatgatgatatcattatgctgacctctgacgagctgcaatttggttatgaggtctggcgggaatttcctgaccggttggtgggttacccgggtcgtctgcatctctgggaccatgagatgaataagtggaagtatgagtctgagtggacgaatgaagtgtccatggtgctcactggggcagctttttatcacaagtattttaattacctgtatacctacaaaatgcctggggatatcaagaactgggtagatgctcatatgaactgtgaagatattgccatgaacttcctggtggccaacgtcacgggaaaagcagttatcaaggtaaccccacgaaagaaattcaagtgtcctgagtgcacagccatagatgggctttcactagaccaaacacacatggtggagaggtcagagtgcatcaacaagtttgcttcagtcttcgggaccatgcctctcaaggtggtggaacaccgagctgaccctgtcctgtacaaagatgactttcctgagaagctgaagagcttccccaacattggcagcttatgaaacgtgtcattggtggaggtctgaatgtgaggctgggacagagggagagaacaaggcctcccagcactctgatgtcagagtagtaggttaagggtggaaggttgacctacttggatcttggcatgcacccacctaacccactttctcaagaacaagaacctagaatgaatatccaagcacctcgagctatgcaacctctgttcttgtatttcttatgatctctgatgggttcttctcgaaaatgccaagtggaagactttgtggcatgctccagatttaaatccagctgaggctccctttgttttcagttccatgtaacaatctggaaggaaacttcacggacaggaagactgctggagaagagaagcgtgttagcccatttgaggtctggggaatcatgtaaagggtacccagacctcacttttagttatttacatcaatgagttctttcagggaaccaaacccagaattcggtgcaaaagccaaacatcttggtgggatttgataaatgccttgggacctggagtgctgggcttgtgcacaggaagagcaccagccgctgagtcaggatcctgtcagttccatgagctattcctctttggtttggctttttgatatgattaaaattattttttattcctttttctactgtgtcttaaacaccaattcctgatagtccaaggaaccacctttctcccttgatatatttaactccgtctttggcctgacaacagtcttctgcccatgtctgggaacacacgccaggaggaatgtctgataccctctgcatcaagcgtaagaaggtcccaaatcataaccattttaagaacagatgactcagaaacctccagaggaatctgtttgcttcctgattagatccagtcaatgttttaaaggtattgtcagagaaaaacagagggtctgtactagccatgcaaggagtcgctctagctggtacccgtaaaagttgtgggaattgtgacccccatcccaaggggatgccaaaatttctctcattcttttggtataaacttaacattagccagggaggttctggctaacgttaaatgctgctatacaactgctttgcaacagttgctggtatatttaaatcattaaatttcagcatttactaatactgc

SEQ ID NO: 78 - DNA, 16104 bp, Homo sapiens
atggacttagcaccagacagggctactggccgcccgtggctcccgttgcacactctatcagtatctcagctccttcgagtgttttggctactgtcattgcttccggggcaggcctgggtccacggggccgagccgcgccaggtgttccaagtgctggaagagcaacctccaggcactctggtaggcaccatccagacgcgccccggcttcacctacaggctcagcgaaagccacgccctgtttgccataaacagtagcaccggagccctgtacaccacctccaccatcgaccgcgagagcctgcccagcgacgtgatcaacctggtggtcctttccagcgcgcccacctaccccaccgaagtgcgagtgctggtgcgggacctcaatgacaacgcccccgttttcccggacccctctatcgtggtcactttcaaggaagacagtagcagcggacgccaagtcatcttagacaccgccaccgactcggacatcggctcaaacggtgtggaccaccgctcctaccgcatcatccgcggcaatgaggcggggcgcttccgtctggacatcaccctgaacccgagcggcgagggagcgttcctgcatctggtgtccaagggcggactggaccgtgaggtcactccgcagtaccagctcctggttgaggtggaggacaagggtgagcctaagcggcggggctaccttcaggtaaacgtgactgtgcaagacattaatgacaaccccccggtttttggcagttctcactaccaggcgggggtgcctgaggacgcggttgtgggttccagcgtcctccaggtggcggcggcggacgcggacgagggcaccaacgcggacatccgctatcgcctgcaggacgaggggacccccttccaaatggaccctgagacgggacttatcacggtgcgggagcccctggacttcgaagctcggcgccaatactcgcttacggtgcaggcgatggacagaggcgtgccttccctcactgggcgcgccgaggcgctgattcagctgctggacgtgaatgacaatgacccggtagtgaagttccgctacttcccggccacctcgcgctacgcctcggtagatgagaatgctcaagtgggcaccgtggtggctctgctcaccgtgacggacgcagattctcccgcggccaacgggaacatctccgtgcaaattctcgggggcaatgagcagcgccactttgaagtgcaaagcagcaaagtgccgaacctgagcctaatcaaggtggccagcgccttggaccgcgagcgcatcccttcctacaacctcacagtttccgtctctgataactacggggcgccccctggcgcagcagtccaggcgcgctcttctgtggcaagcctggtgatttttgttaatgacatcaatgaccatcctcctgtcttttcacagcaagtgtacagagtgaacctgagcgaggaggcgcctccgggaagctatgtgagtgggatatctgccactgatggcgactctggtctcaatgctaatctgcgttacagcattgtctctggcaatggactgggatggttccatatcagtgaacatagcggcctcgtgaccactgggtcctctgggggcctggaccgtgaacttgcttcccagattgttctgaatataagtgcccgggaccagggagttcaccccaaggtgtcctatgcccagcttgtagtaactctcctagatgtgaatgatgaaaagccagtatttagccagccagaagggtatgatgtgtctgtggttgagaatgccccaacagggacagaactgttgatgctcagggcaactgacggggacctgggtgacaacggaacagtgcgcttctccttacaagaggcagagactgaccggaggtccttccgtctggatcctgtgtctgggaggttgagtactatttcctccttggacagagaagagcaagccttctactccctgttggttctggccacagatctgggctcccctccccagtcatcaatggctcgcataaatgtgagtcttctggatataaatgataacagccctgtcttctacccggtccaatactttgctcacattaaggagaatgagcctggaggtagctacatcaccactgtgtctgccactgacccagacttgggtaccaatggtactgtcaaatatagcatatctgctggggacaggtctcggtttcaggtcaatgctcagagtggggttatttctacaagaatggccctagacagagaagaaaaaacagcttatcagttgcaaatagtagctactgatggtggcaatttacaatctcccaaccaggcaatagtaaccatcactgtattggacactcaagacaacccacctgtattcagtcaggttgcctacagctttgtggtttttgagaacgtggcgctgggatatcatgtgggtagtgtgtctgcatccaccatggatctcaattccaacatcagttatctcattactactggggatcagaaaggtatgtttgctatcaaccaggtcactgggcagcttaccacagcaaatgtgattgatagagaagagcaatccttttatcagctgaaggtagtggccagtgggggcacagtgactggagacactatggttaacataacagttaaggatttgaatgacaactctccccatttccttcaggcaatagagagtgtaaatgtggtggagaattggcaggcaggtcacagcattttccaggccaaagctgtggaccctgatgaaggtgtcaatggcatggtactctatagtctgaagcaaaaccccaagaacctgtttgctatcaatgaaaagaatggcactattagtctgcttgggcccctggatgttcatgctggctcctaccaaatagagatcttggcatctgacatgggtgtcccacagctctcctctagtgtcatcttaacagtttatgtccatgatgtaaatgacaattcaccagtgtttgaccaactctcttatgaagtcaccctttctgagtcagaacctgtgaattctcgattctttaaagtacaagcttctgataaggattcaggagcaaatggtgaaattgcatacaccattgctgaaggaaatacaggggatgcttttggcatattcccagatggtcaattgtatataaaaagtgaactggaccgtgaacttcaagacagatatgttttaatggttgttgcttctgacagagcagtggaaccccttagtgctactgtgaatgttactgtaattttagaagatgtaaatgataacagacctctttttaacagtaccaattacacattttacttcgaagaagagcagagggctgggtcgtttgtgggcaaagtaagtgctgtagataaagactttgggccaaatggagaagtaaggtattcttttgaaatggtgcagccagattttgagttgcatgccatcagtggggaaattacaaatactcatcagtttgacagggagtctcttatgaggcggagagggactgctgtgtttagctttacagtcatagcaacagatcaggggatccctcagcctctcaaggatcaggccactgtacatgtttacatgaaggatataaatgataatgctcccaaatttttaaaagacttttaccaagctacaatatcagaatcagcagccaatctgacacaagtgttaagagtatctgcctcagatgttgatgaaggtaataatggacttattcactattctataataaaaggaaatgaagaaagacagtttgctatagacagtacctctggtcaggtaacactaattggcaaattagactatgaagcaacacctgcctattcccttgtaattcaagcagtggattcagggacaatccccctcaattcaacgtgtactttaaatattgatattttagatgaaaatgacaataccccttctttccctaaatcaacactctttgttgatgttttggaaaacatgagaattggtgaactcgtgtcctctgttactgcaactgattccgattcaggtgacaatgctgatttatattacagtattactgggactaacaaccacggaacttttagcattagcccaaacactgggagtatttttcttgccaaaaaactggactttgaaacacagtctttgtataaattaaatataacagcaaaagaccaaggaagacctcctcgttcatctacaatgtcagtggttattcacgtgagggactttaatgacaatcctcctagctttcctcctggagatattttcaagtctattgttgagaacattcccatcggtacatctgtcatttcagtgactgcacatgaccctgatgcagacattaatggtcaactatcctacacaatcattcaacagatgccaagaggcaaccactttaccatagatgaagtcaaagggactatatatactaatgctgaaatagatcgggaatttgctaatctctttgagttgactgtaaaagccaatgatcaagctgtgccaatagaaactagacggtatgctttgaagaacgtgaccattttggttacagacctcaatgacaatgtcccaatgtttatatcacaaaacgcccttgctgcagacccatcagctgtgattggttccgttctgacaacaattatggctgctgacccagatgaaggtgctaatggagaaatagagtatgagatcatcaatggggacacagacaccttcattgttgatcgttatagtggagacctgagagtggcttcagcgttggtgccttcacagttgatctacaatctcatagtttcagcaacagaccttgggcctgaaaggaggaaatcgaccactgaattgaccatcattcttcagggccttgatggacctgtttttactcaacccaaatatataactattttgaaggaaggagaacccattggcacaaacgtgatatcaatagaagcagctagccccagaggatctgaggccccagtggagtattatattgtttcagttcgttgtgaagaaaaaactgttggacgcctctttactattggacgacatactggtataattcagaccgcagccattctggaccgggagcaaggagcatgtctttacctggtggatgtttatgccatagaaaaatcaactgcttttcccagaacacagagagcagaggtagaaataacacttcaggatatcaatgacaatccaccagtatttccaacggacatgctggatctcacggtagaggagaacattggagatggctctaagattatgcagctgacagccatggatgctgatgagggtgcaaatgctctcgtcacatacactatcattagtggagctgatgatagttttcgcatcgacccagaatccggagatctgatagcaaccaggcggttggacagggaacgccgctccaaatattcactgctagttcgtgctgatgatggtcttcagtcctcggatatgagaattaatatcactgtcagtgatgtgaatgaccatacacccaaattttccagacccgtgtactcttttgacattcctgaggacacaatccctggttctttggtagcagccattttagccacggatgatgactctggtgtgaatggagaaattacatatattgtgaatgaagatgatgaagatggcatctttttcctgaatcctattactggggtctttaatttgactcgattattagattatgaagtacagcaatattatatcctcactgttcgagcagaagatggtgggggacaatttactaccatcagagtttatttcaatattctagatgtaaatgataatccacctattttcagcttgaattcatacagcacatctttaatggagaatctacctgtgggatctactgttcttgtgtttaatgttactgatgcagatgatggcatcaactctcaattgacttatagcattgcttcaggtgatagccttgggcagtttactgttgacaagaatggtgtactcaaagtcctaaaagctttggatcgggaaagtcagtccttctacaacttggttgttcaagtgcatgacctgccacagattccagcctccagattcacaagcactgctcaagtctccattattttgttggatgtaaatgataacccaccgacatttctttcccctaaattgacatacattccagaaaatacacctattgatactgttgttttcaaagctcaagcaactgacccagatagtggcccaaacagctatattgagtacactctgctgaaccctttgggaaacaagttcagtattgggaccattgatggtgaagtgaggctcactggagaactggacagagaagaagtttctaattatactctaacagtggtggctacagacaaaggtcaaccatctctctcttcatctacagaggttgtagttatggtacttgacatcaatgataacaaccccatctttgcacaagctttgtataaagtggagattaatgaaaacacacttactggaacagatataatacaagtgttcgcagcagatggagatgaaggcacaaatggacaggttcgctatggcattgttaatggtaataccaatcaggaatttcggatagactctgtcacaggtgccatcactgtcgctaaacctttggatagagaaaagacccctacctaccatttaactgttcaggcaacagatcgaggcagcacacccagaactgatacctccacggtcagcattgttctactggatattaatgactttgttcctgtatttgagctatctccatattctgtaaatgtccctgagaatttagggacactacccagaacaattcttcaggtggtggcaagagatgatgatcgaggatctaacagcaaactctcatatgttctgtttggtggtaatgaagacaatgcttttactctctcagccagtggagaacttggagtaacacagagtctggatcgggaaacaaaagagcgctttgtcttaatgattacagctacagattcaggatcccctgccttgactggaactggaacaatcaacgtcatagtagatgatgtcaatgacaatgtccccacatttgccagtaaagcgtatttcacaacaattcctgaggatgcaccaactggaacagatgttttattggtaaatgcctcagatgctgatgcttcaaagaatgcagttataaggatcatcggtggaaactctcagttcacgatcaacccatcgacaggacaaatcatcaccagcgcattgttagatagggaaacaaaagataattatactttggtagtggtctgcagtgatgcgggatccccagagcctctttccagttccaccagtgtgcttgtcactgtgactgatgtcaatgacaatccaccaagatttcagcatcacccatatgtcactcacatcccatctcctactcttccaggttcctttgtctttgcggttacagtcacagatgctgatattggaccaaattctgaactgcattattctctttcgggtagaaattctgaaaaatttcacattgacccactgaggggagccattatggccgccggaccactaaacggagcttcagaagtgacattttctgtgcatgtaaaagatggtggctcatttccaaagacagattctacaacagtgactgttagattcgtgaataaggccgatttccctaaagtgagagccaaagaacaaacgttcatgtttcctgaaaaccaaccagtcagctctcttgtcaccaccatcacaggatcctctttaagaggagaacctatgtcatattatatcgcaagtgggaatcttggcaatactttccagattgatcagttaacagggcaggtgtctattagtcaacctctggattttgaaaagatacaaaaatatgttgtatggatagaggccagagacggtggtttccctcctttctcctcttacgagaaacttgatataacagtattagatgtcaatgataatgccccaatttttaaggaagacccatttatatctgaaatattggaaaacctttcccctcgaaaaatacttactgtttcggcaatggacaaggacagtggacccaatggacagttagattatgaaattgttaatggcaacatggaaaatagtttcagtatcaatcatgctactggtgaaattagaagcgttagacctttggacagggaaaaagtatctcattatgtcctaaccataaaatcatcagacaaagggtccccgtctcagagtacttcagtaaaagtcatgattaacattttagatgaaaatgataatgcccctaggttttctcagatatttagtgcccatgttcctgaaaattcccccttaggatacacagttacccgtgtcacaacttctgatgaagacattgggatcaatgcaattagtagatattctataatggatgcaagtcttccatttacaattaatcccagcacaggggatattgtcataagcagacctttaaatagggaagatacagaccgttacagaattcgagtttccgcacatgattctgggtggactgtaagtacagatgtcacaatatttgtgacagacatcaatgacaatgctccaagatttagcagaacttcctattatttagattgccctgaacttactgagattggctccaaagtaactcaggtatttgcaacagatcctgatgagggatcaaatggacaagtgttttatttcataaaatcccaatcagaatatttcaggattaatgccaccactggagagattttcaataaacagatcttaaaataccaaaatgtcactggcttcagtaatgtgaatatcaacaggcatagttttatagtgacatcttcagatcgaggtaaaccttccttaattagtgagacaacagttaccatcaatatagtggacagtaatgacaatgcacctcaatttcttaaaagtaaatatttcactccagtcaccaaaaatgttaaggttggtacgaagttaatcagagttacagcaatagatgacaaagattttggactgaattcagaagtggagtatttcatttctaatgataaccatttaggaaaatttaagttggacaatgatacggggtggatttcagtagcatcctccctgatttctgacttgaaccaaaacttttttatcacagtcactgcaaaggataagggaaaccctccactttcttcccaagcaactgttcacataactgtcactgaggaaaactaccatacacctgaattctctcaaagccacatgagtgcaaccatccctgagagccatagcattgggtccattgtcagaactgtttctgcaagagatagagatgcagcgatgaatggcttgattaagtacagcatttcttcaggaaatgaagaaggcatttttgcaatcaattcttctacaggtatattaacactagccaaagctcttgattatgagctatgccagaaacacgaaatgacgattagtgctatagatggaggatgggttgcaagaactggttactgcagtgtgaccgtaaatgtgattgatgtgaatgataattctccagtattcctctctgatgactatttccctactgttttggaaaatgccccaagtggaacaacagttatccacctaaatgcaacagatgctgactctggaacaaatgctgtgattgcgtatactgtacagtcatctgacagtgacctctttgtcattgaccctaacacaggagtcataaccactcaaggcttcttggattttgaaaccaagcagagctaccatcttactgtgaaagccttcaatgtccccgatgaggaaaggtgtagctttgccactgttaatatacaattaaaagggacaaatgaatatgtgccccgttttgtttccaaactttactattttgaaatctcagaagcagctcctaaaggtactattgttggagaagtgtttgctagcgaccgtgatttgggcactgatggggaggtacactatttgatttttggtaatagtcgaaagaagggtttccagatcaataagaagactggacagatttatgtttctggaattcttgatcgagaaaaagaagaaagggtgtctttgaaggtattggccaagaactttggcagcattagaggtgcagatatagatgaggtcactgtaaatgtcaccgtgcttgatgcaaatgacccacccatttttactctaaacatctacagtgtgcagatcagtgaaggggtcccaataggaactcatgtgacctttgtcagtgcctttgactcagactccatccccagctggagcaggttttcttacttcatcggatcagggaatgaaaatggtgccttttctattaatccgcagacaggacagatcaccgttactgcagaattagatcgagaaacccttcccatctataatctctcagttttggctgttgattcagggaccccctcagctacaggtagtgcctctttattagtcaccctggaagatataaatgataacgggcccatgctgactgtcagtgaaggagaagtcatggaaaacaaacggccaggcactttggtgatgacccttcagtccactgaccctgatctccctccaaatcaaggtccctttacttattacttgctgagcacaggtcctgccaccagttatttcagtctgagcactgctggagttctgagcacaaccagagagattgacagagagcagattgcagacttctatctgtctgtggttaccaaggattctggtgttcctcaaatgtcttccacaggaactgtgcatatcacagttatagaccaaaatgacaatccttcacagtctcggacggtggagatatttgttaattattatggtaacttgtttcccggtgggattttaggctctgtgaagccacaggatccagatgtgttagacagcttccactgctcccttacttcaggagttaccagcctcttcagtattccagggggtacttgtgatctgaattcccagccaaggtccacagatggcacgtttgatctgactgtccttagcaatgatggagttcacagcacagtcacgagcaacatccgagttttctttgctggattttccaatgccacagtggataacagcatcttacttcgtctcggcgtaccaacagtaaaggacttcttgaccaaccactatcttcattttttacgcattgccagctcacagctgacaggcttagggactgctgtgcaactgtacagtgcatatgaagagaacaatagaacgtttcttttggcagctgtgaagcgaaatcataatcagtatgtgaatcccagtggcgtagccaccttctttgaaagcatcaaagagatccttctccggcagagtggagtaaaggtggaatctgtggatcatgactcctgtgtgcatggcccatgtcagaatggagggagctgtctacgaagattggctgtgagctccgtattaaaaagccgtgagagtcttccagtcatcatcgtggcaaatgaacctctgcagcctttcttatgcaagtgtctgccaggatatgcgggtagctggtgtgaaatagatatagatgaatgtcttccatcaccttgccacagtggtggaacctgtcacaatttagtgggaggattttcatgcagctgcccagatggcttcactggtagggcgtgtgagagagatatcaatgagtgcctgcagagtccttgcaagaatggtgccatctgccagaattttccaggaagcttcaactgtgtttgcaaaactggatacacagggaaaatgtgtgaatcttcagtcaattactgtgaatgcaacccctgctttaatggtggttcctgccaaagtggtgtggattcttattattgtcattgtccatttggtgtctttggaaaacactgcgagttgaacagttatggatttgaggagttatcatacatggaatttccaagcttggaccccaataacaactatatttatgtcaaatttgccacgattaaaagtcatgccttattgctttacaactatgacaaccagacaggcgaccgggctgagtttttggcccttgaaattgccgaagaaagactaagattctcttataatttaggcagtggtacatataagctcaccaccatgaagaaggtgtcagatggacattttcacactgtgattgccaggagagcaggaatggcagcctccttaactgtggactcctgttctgagaaccaagagccaggatattgtactgtcagtaatgtggcagtttcagatgactggactcttgatgttcagccaaatagagttacagttggaggtatcagatctctagaaccaatccttcagagaagaggacacgtggaaagccatgattttgttgggtgtataatggagtttgcagtcaatggaaggcctctggaacccagccaagctttggcagcacaaggcatcctagatcaatgccctaggctggaaggcgcttgtactcgcagcccatgccaacatggtggcacatgtatggattactggtcatggcagcagtgtcattgcaaagagggactcactgggaaatactgtgaaaaatctgttactcctgacactgccttatcattagaaggcaaagggcgcttggactaccacatgagtcagaatgagaagcgggaatatttgttaaggcaaagcttacgaggtgccatgttggagccttttggtgtgaacagtctggaagtaaaatttaggaccagaagcgagaatggcgttttaatccatatccaagaaagcagcaattacactactgtgaagattaagaatggcaaagtatattttacatccgatgcaggaattgctgggaaagtggagagaaatattcctgaagtatatgttgcagacggccactggcacacttttctaattgggaaaaatggaacagcaacagtattgtctgttgacagaatatataacagagatattatccaccctactcaggacttcggtggccttgatgtgcttactatatcacttggaggaattccacccaatcaagcacatcgagatgcccaaacagcaggttttgatggctgcattgcttctatgtggtatggtggagaaagtcttcctttcagcgggaagcatagcttggcctccatctcaaaaacagatccctcagtgaagattggctgccgtggcccgaacatttgtgccagcaacccctgctggggtgatttgctgtgcattaatcagtggtatgcctacaggtgtgtccctcctggggactgtgcctcccacccgtgccagaatggtggcagctgtgagccaggcctgcactccggcttcacctgtagctgcccagactcgcacacgggaaggacctgtgagatggtggtggcctgtcttggcgtcctctgtcctcaggggaaggtgtgcaaagctggaagtcctgcggggcatgtctgtgttctgagtcagggccctgaagagatctctctgcctttgtgggctgtgcctgccatcgtgggcagctgcgcaaccgtcttggccctcctggtccttagcctgatcctgtgtaaccagtgcagggggaagaaggccaaaaatcccaaagaggagaagaaaccgaaggagaagaagaaaaagggaagtgagaacgttgcttttgatgaccctgacaatatccctccctatggggatgacatgactgtgaggaagcagcctgaagggaacccaaaaccagatatcattgaaagggaaaacccctaccttatctatgatgaaactgatattcctcacaactcagaaaccatccccagcgcccctttggcatctccagagcaggagatagagcactatgacattgacaacgccagcagcatcgccccttcggatgcagacatcattcaacactacaagcagttccgcagccacacaccaaaattttcaatccagaggcacagtcccctaggctttgcaaggcaatcccccatgcccttaggagcaagcagtttgacttaccagccttcatatggtcaaggtttgagaaccagctccctaagccactcagcatgcccaactcccaaccctctgtctcgacacagtccagcccctttctccaaatcttctacgttctatagaaacagcccagcaagggaattgcatcttcctataagggatggtaatactttggaaatgcatggtgacacctgccaacctggcattttcaactatgccacaaggctgggaaggagaagcaagagtcctcaggccatggcatcacatggttctagaccagggagtcgcctaaagcagccgattgggcagattccactggaatcttctcctccagtcggactttctattgaagaagtggagaggctcaacacacctcgccctagaaacccaagtatctgcagtgcagaccatgggaggtcttcttcagaggaggactgcagaaggccactgtctagaacaaggaatccagcggatggcattccagctccagaatcctcttctgatagtgactcccatgaatctttcacttgctcagaaatggaatatgacagggagaagccaatggtatatacttccagaatgcccaaattatctcaagtcaatgaatctgatgcagatgatgaagataattatggagccagactgaagcctcgaaggtaccacggtcgcagggccgagggaggacctgtgggcacccaggcagcagcaccaggcactgctgacaacacactgcccatgaagctagggcagcaagcagggactttcaactgggacaaccttttgaactggggccctggctttggccattatgtagatgtttttaaagatttggcatctcttccagaaaaagcagcagcaaatgaagaaggcaaagctgggacaactaaaccagtccccaaagatggggaagcagaacagtatgtgtgaagtttatgtactggcactataaaatataaaaacaagaaataatactcaaaccattgtaaagttgctgactaggttgggtcacatttgaaaaacaggccagtatggactagtggtggagggaaaactttaaaaataataaccacaatgctgctgaaacagactcacaacaactcttaatttaaacatgtgtggttgaatttatttccctgcatgcattgtgttttgtaactagttatgtggcatgcagcatttggaaaatttttcttatttaccagtgtttgatttgtgatttttaaaaattgatacctttaccattgcagaaaagaacttgtgctttcccagtggcgtatgtgtattgtttcaactgtattattataattatattttgcattgcaagattcttgatgttaaaccaatccttgtaaagtgtaaaaaggaaccctcctatcgtggaatgaaagattaagtatattaacacttttcagaatgatagtttctgtatttgatgttgctcagaaatgtctcagtatttgagtaagttttacatgacagtgggtactgaaattaagtcattttgttcagcactttaacgctttcttatagaattgtcttaaaacttctggatccttgagcaaatgattatagtctcctgactttcatgaggcttccattaggaacagaatgattgcatgttgtccccagaacactgccaccttgctatgcgaatgatgttctcagcagcacttctaagaaacactcttaaaagttatttattgaaaatttttcgtatgcttttaatattttaaagaattgacctaaggaaagcttatgattggacttattttccaaccagataacatttactctaagtacccagtttttataatttatatgaaatcagatttcaacacttactttgtcattttgtagatcatttttttaaaatactgtgtaaaaactttttttacacctaagctgtgtttttgatactgatattttcctatgctgaatagttttcttactttcagggaaggtaagaaaatactttttttatatttgttacttatgtaacattcatatttttctcattttgatatttgtaacatactgtatgctttctacttgtaaatgtcaacaatagaattaaaatatttattt

SEQ ID NO: 79 - DNA, 3687 bp, Homo sapiens
aacgggggcgcgcggtcgggggcaggttgggccggaagaggggtccgggccggcactgaggcgggaagggggtcggttgagatgggacggccggagtctgcgggcggagggagtcgcgggccttttgagggaggaggcagagcgcgccgggccggtggcatcttccttactttgtccatcctccggactcgcgatcttccttccggagccatgtcagaaggagtggacttgattgatatatatgctgacgaggagttcaaccaggacccagagttcaacaatacagatcagattgacctgtatgatgatgtgctgacagccacctcacagccctcagatgacagaagcagcagcactgaaccacctcctcctgttcgccaggagccatctcccaagcccaacaacaagacccctgcaattctgtatacctacagtggcctgcgtaatagacgagctgccgtttatgtgggcagcttctcctggtggaccacagaccagcagctgatccaggttattcgctctataggagtctatgatgtggtggagttgaaatttgcagagaatcgagcaaatggccagtccaaagggtatgctgaggtggtggtagcctctgaaaactctgtccacaaattgttggaactcctaccagggaaagttcttaatggagaaaaagtggacgtgaggccggccacccggcagaacctgtcacagtttgaggcacaggctcggaaacgtgagtgtgtccgagtcccaagagggggaatacctccacgggcccattcccgagattctagtgattctgctgatggacgggccacaccctctgagaaccttgtaccctcatctgctcgtgtggataagccccccagtgtgctgccctacttcaatcgtcctccttcggcccttcccctgatgggtctgcccccaccaccaattccacccccaccacctctctcctcaagctttggggtccctcctcctcctcctggtatccactaccagcatctcatgcccccacctcctcgattacctcctcatcttgctgtacctccccctggggccatcccacctgcccttcacctcaatccagccttcttccccccaccaaacgctacagtggggcctccaccagatacttacatgaaggcctctgccccctataaccaccatggcagccgagattcgggccctccaccctctacagtgagtgaagccgaatttgaagatatcatgaagcgaaacagagcaatttccagcagtgccatttccaaagcagtatctggagccagtgcaggggattacagtgacgcaattgagacgctgctcacagccattgcggttatcaaacagtcccgggttgccaatgatgagcgttgccgtgtcctcatctcctctcttaaggactgtcttcatggcatcgaagccaagtcctacagtgtgggtgccagtgggagctcttccaggaaaagacatcgctcccgggaaaggtcacctagccggtcccgggagagcagcaggaggcaccgggatctgcttcataatgaagatcggcatgatgattatttccaagaaaggaaccgggagcatgagagacaccgggatagagaacgggaccggcaccactgagaaaggagtctggttggaagcaaatgtttttttaatggacttgcatctcctcaccttgatcaggactaaaggacggaggccgccccacccccttccctttcctccaaacccctaactccctccagacacccagggaataccctctgccccacaggattgaagactgcttggcagtcctcccaatcccacacctcctgtttgccaggggaaagaacctaaagacttcgtgtgattgggaggggtggcagacaggaagaaaacatgtccaggcccctggtctccatagagaatggtgctttgtccaagaaaacgtatgagtttctgattctccgggagccgttcaatggtgaggttgatgggaagacttccttcccaaagaaaatagatcctccatgcaggatctaggagagtgactgggtgtgccaaaatatgcccagggtcctgccctcagcactagatttaatggggccaagagggtccaaaccccttgctaacataccacttctttgtttaactcctttacctttccagccctttgaggagggaccatgagaacagaaattaccttatgaaaagctacttctgttcctgctttccctctcacgtattgacggtttatttctttgacctcccagagggctgaactctttcaactctgcgctgcccagccttctcagtggacttgcccctcctaagcagagaaggcctatgaggttgcttgctgctgggaagcctggcagagccaattaccaccctctgctgcttagtgcttgggtacctcttgcaataaccagctcttagttgttccctttccctggggcttttccatttaacacatggagcccttcccccagaaggctacttccttgttttagaggaaggtactgcccattgggagatggggacattgggacctcagcaatgaagaacccttgtgaagtaaccaggaggaatggggaaagaagcaagttgggcaggatatggcctacttccataggcttttcttttttcaggtttgatgtaagcatgggcttacatcccccaggtacatacttttacttattgtgggataacctggcactagtaggcaggtaaagtcacaaatttggtgtcttttcaccttttgactgttgacttaatagctcctctcactctgcctggagatacttcctgcctcagatgaggagccagaagaaacagagcccgacttgaatgaactcagctcagagttctaaggaccagcattctgggggccattttctctacaggcaaatggaattgcttttccataacatccaaattgtaatgtggttgctgctgaaggaggaggcagcagcgaggtcctgcggtacccatggggtgatgctacttctgcatgcatctacagggcatctgacacctaacatgagacgtggcatgtgagatgagacttggcatgtgagacatagggtcactagagacccttctgggtcagaggagagagactgaattggactaaacccgtcctctgttcccagcacgtttctcatatagccctcagtcactgagggagtcccccgcaggattggagaggcacattcccttgggacagaggctacaggttggagctttttttcccctgtcccccaaccccatccccacctccacttcagaacatggcaccccacccaactggccaagtgttaagtgatgtgcttattgagagcaactccgggtgtcttttaaaatgtagagaaaaggtgacagtttaaggaaaaatatatatagaataccagaaatgccgtttacccggagaatttttttctccccatttgttttgtttttactcaatgacaccatttttagttttatttcctgatagcaaaaggaaaaaaaacacccatccctcaaaaaggccaaggtcccgtccccctgttgtcggtgatttgtttgtctttctgataggttgaaaattgtgtaataaacttgatgacgctgtcaatcttttatactgcattgtatttttttccttttgtaacaaaatatttttaaataataaatggggtgtgagctgttttatgg

SEQ ID NO: 80 - DNA, 2665 bp, Homo sapiens
acatgcgcagtagctgtaggagggggtgggcgctccattgggcgtttctcttggtttttcctttccgcgcggcttgggcggacgtctcgtgagacgtgggacttctcgcgggaactgcattcaaatatcccaggcgcttactcgagagctagctgagcgaatgggccggcgactgtggagttagcgtcctcaatgtggacgccctgagctcccattaggagccgctggctgcggcagcaggggactagcgtgagagttggctaaaaaaaagaaaagaacatggaggcagatataatcacaaatcttcgatgcaggctcaaagaggctgaagaagagcgactaaaagctgcacagtatggtttacaactagtagagagtcaaaatgaattacagaatcaattggataaatgtcgtaatgaaatgatgaccatgactgagagttatgaacaagaaaaatatacccttcaaagagaagttgaactcaagagtcgaatgttagaaagtttgagctgcgaatgtgaagctattaaacaacaacaaaaaatgcacctggagaaattggaagaacaactaagcagaagccatggacaggaagtgaatgaactaaaaactaagatagaaaaactgaaagtggaattagatgaagccaggcttagtgaaaagcagctgaagcaccaagtagatcatcagaaggaactcctctcttgtaaatcagaggaactgcgcgtaatgtctgaacgtgtgcaggaaagcatgtcttcagagatgctggctcttcaaattgagctgacagaaatggagagtatgaagaccaccctcaaagaagaagtgaatgaactacaatacagacaagaacagctagaacttcttattactaacctaatgcgccaggtagaccggcttaaagaggaaaaagaggagcgagagaaagaagcagtttcttactataatgccctagagaaagctcgtgtagcaaatcaagatcttcaggtacagttggaccaggcactccagcaagccttggatcccaatagtaaaggcaactctttgtttgcagaggtggaagatcgaagggcagcaatggaacgtcagctcatcagtatgaaagtcaagtatcagtcactaaagaagcaaaatgtatttaacagagaacagatgcagagaatgaagttacaaattgccacgttgctacagatgaaagggtctcaaactgaatttgagcagcaggaacggttgcttgccatgttggagcagaagaatggtgaaataaaacatcttttaggtgaaattagaaatctggagaaatttaagaatttatatgacagtatggaatctaagccttcagtcgactctggtactctggaagataacacctattatacagatttacttcagatgaagctggataacttaaacaaagaaattgaaagcactaaaggtgaattgtccatacagcgaatgaaagcattatttgagagccagcgggctctagatattgagcgaaaactttttgcaaatgaaagatgcctccagctttcagaaagtgaaaatatgaaactgagagctaaactagatgaattgaaactaaaatatgaacctgaagagacagttgaagtgcctgtactgaaaaagaggcgtgaggtgctccctgtggatataaccaccgctaaagatgcatgtgtcaacaacagtgctctcgggggagaagtttatcgattaccgcctcagaaagaggagacacagtcctgccctaacagtttagaagataacaacttgcaattagaaaaatcagtttctatatacacaccagtagtcagtctctctcctcacaaaaatctgcccgtggatatgcagctgaagaaggaaaagaaatgtgtgaaactcataggagttcccgctgacgctgaggccttaagtgaaagaagtggaaacacccctaactctcccaggttagctgctgaatcaaagcttcaaacagaagttaaagaaggaaaagaaacttcaagcaaattggaaaaagaaacttgtaagaaattacaccctattctatatgtgtcttctaaatctactccagagacccagtgccctcaacagtaaagacttgtctttaataagagtacggtgccacttgcctcaaaagttactatggtgcttaagattgtcttgatctgacatatatcaccttctgggttatttactcattgtgccaggacctggcattttcatgtgcctttgaccaagtgttcagaatttgcttgactctaacctggagagcttcttaagtgatgccccttcatggagcttctatgacagtgaataaactattaattgaaggaaaatgttataattaatgtatctatttgctgcattgtatatggattaaatgataaaaaacaagtaatctaccctcagagccatgtatttgagaatgcttcaatcatattttcctatgtacttttttttataaacttagttttagactatgttgtaaaaatgggaaggttgtaaactatgttgtaaaaataggaaatgtggcttaaaatatatacattatattgtttcaggattttgtcagtgtttaaagaaccaatgttcatctttgtatttatatacatgatttaaattttgtctaaaattttaaataaaactgcagtgatttatcctt

SEQ ID NO: 81 - DNA, 6285 bp, Homo sapiens
ctcccggctccgtagtaagcatggcggcggcggcgttcgtggtccctcgggtgaaacagaaagcgggagctacgcggagagggagcgaagagcggggctgaggcggcggcgtcactgccaggaaacaaccccaacagtcagcgcgccggcggccgcggcggccctgagagctgactctgcagctgaggtagagagacaacgatcaggaaccctaagaagaggcgccagaggagccgccttctgcctcagaacggcgtgactcggagaattggagcgttattcagtatattaatgtcttattgataatggcagaacatccaccactactggatacaactcagatcttaagtagtgatatttctcttttgtctgcccctattgtaagtgcagatggaacacaacaggttattctggtacaagttaacccaggagaagcatttacaataagaagagaagatggacagtttcagtgcattacaggtcctgctcaggttccaatgatgtccccaaatggttctgtgcctcctatctatgtgcctcctggatatgccccacaggttattgaagacaatggtgttcgaagagttgtcgtggtccctcaggcaccagagtttcaccctggtagtcacacagttctccaccgttctccacatcctcctctacctggtttcattcctgtcccaactatgatgccgcctccaccacgtcatatgtactcacccgtgactggagctggagacatgacaacacagtatatgccacagtatcagtcttcacaagtctatggagatgtagatgctcactctacacatggaaggtccaactttagagatgaacgatctagtaaaacatatgaacgtttgcagaaaaaattgaaggatcgccaaggaacacagaaagataaaatgagcagtccaccatcatcaccccagaaatgcccttctcccattaatgaacataatggacttataaaaggacaaattgctggtggtataaacacaggatcagcaaaaatcaagtctgggaaggggaaaggtggtacacaagttgatacagaaattgaagaaaaagatgaagaaactaaagcatttgaagcacttctttccaacattgtcaaaccagtggcctccgacatccaggcaaggacagtagtacttacctggtcaccaccttccagcctcattaatggtgaaacagatgaaagtagtgtaccagagctctatggttatgaagttctgatctcaagtactggaaaagatgggaaatacaaaagtgtatatgtaggagaagaaacaaatatcactttaaatgatctcaagccagccatggattaccatgcaaaagtccaggcagaatataattctataaagggaactccttcagaggctgaaatctttaccaccttgagctgtgaacctgatatacctaatccaccaaggatagccaatcggaccaaaaattcactcactttgcaatggaaggcacctagtgacaatggttctaaaatccaaaactttgtattagaatgggatgaaggaaaaggaaatggagaattttgtcagtgttacatgggctcacagaaacaatttaaaattactaaactttcaccagcaatgggctgtaaattcagactatcggccagaaatgactatggtacaagtggttttagtgaagaagtcttatattacacctcaggctgtgctccttctatgccagcaagtcctgtattaaccaaggctggaattacttggttatccttacaatggagtaagccctcaggaacaccatcagatgaaggaatttcttacattttagagatggaggaagaaacttcaggatatggttttaagcctaaatatgatggagaagatcttgcttacacagtgaaaaatctcagacgtagtactaagtataaatttaaggttattgcttacaactcagaaggtaaaagtaatccaagtgaagtagtagaatttactacttgccctgataaaccaggcatacctgtaaagccttcagtgaaaggaaagatacattcacacagttttaaaataacctgggatccaccaaaagacaatggcggagcaaccatcaataaatatgtagtggagatggcagaaggttctaacggaaacaaatgggaaatgatatacagtggtgctaccagggaacatctttgtgatcgactgaatccaggctgtttctatcgtttacgagtttactgcatcagtgatggaggacagagtgcggtctctgaatctttacttgtgcagactccagctgtgcctcctggcccatgcctccctcccagattacagggtagacccaaagcaaaagaaatacagttacgatggggaccccctctggttgatggtggatcacccatttcctgttacagtgtggaaatgtctcctatagaaaaagatgaacctagagaagtttaccaaggttctgaagtagaatgtacagtgagcagccttcttcctggaaagacatacagcttcagactacgtgcagctaacaaaatggggtttggaccattttcagaaaaatgtgatattactacagcccctgggccaccagatcagtgcaagccccctcaagtgacatgtagatctgcaacttgtgcacaagtgaattgggaggttcctttgagtaatggaacagatgtcactgaatatcgactggagtggggaggagttgaaggaagtatgcagatatgttactgtgggcctggtctcagttatgaaataaaaggactttcaccagcaactacctattattgcagggtccaggctctgagtgttgtgggtgcaggccctttcagtgaagtagtagcctgtgtgactccaccatcagttcctggcattgtgacctgtcttcaagaaataagcgatgatgagatagaaaatccccattattcaccttctacatgccttgcaataagctgggaaaagccttgtgatcatggttcggaaatccttgcctacagcatagactttggagataaacaatccctaacagtgggaaaggttacaagctatattatcaacaatttgcaaccagatacaacatacagaatacgaattcaagccttgaatagccttggagctggtcctttcagccatatgataaaattaaaaactaagcctctccctcctgatccacctcgtctggaatgtgttgcctttagccaccagaaccttaagctgaaatggggagaaggaactccaaagacattgtcaaccgattctattcagtaccaccttcagatggaggataagaatggacggtttgtatccctatacagaggaccatgtcatacatacaaagtacaaagacttaatgagtcaacatcctataaattctgtattcaagcttgtaatgaagctggggaaggtcccctctcccaagaatatattttcactactccaaaatctgtcccagctgccttgaaagcccccaaaatagagaaagtaaatgatcacatttgtgaaattacatgggagtgtttacagccaatgaaaggtgatccagttatttacagtcttcaagttatgttgggaaaagattcagaattcaaacagatttacaagggtcccgactcttccttccggtattccagccttcagctgaactgtgaatatcgcttccgtgtatgtgccattcgccagtgccaagactctctgggacaccaggacctcgtaggtccctacagcaccacagtgctcttcatctctcagaggactgaaccaccagccagcaccaacagagacactgtggaaagcacaaggacccgacgggcactgagtgacgagcagtgtgctgccgtcatccttgtgctgtttgctttcttttccattttgattgcctttatcattcagtactttgtaatcaagtgaaaatataactttattttttaactctattacattttattttgtcatgtactaaaattatttctgtattgcttttataaaaaacagtggcatttagcactggcattgagactatagcacatcatttttgccattttcagtgcttatattgttaggtagaggctggcactttattagaatgcaagccacaaaaatatcaattttgttttttttgttagggtgggtcttctttttttctttccctctctctttttttaacaaatgccttcttatagaaaaactttctaagaggcaacaatttagaatggatattttgacgaatcggcatgagtgtaacagtgataacctgatctgtttgttttaaagattattaccaagtgaaaaattcagaatgaatagaatttacactaacatgctatataaaatgttaaagtctgatgctgtgaaagcaatctagtgctatatttctacctcctcatttgtcttaattatttggtaagtgggattatgatgagtaactggaggggcttagaaacaaaaactggatgaaagagtatgcatgaagaaaagcttctttgataaatgtggagttcttcattataaatatatattcatgaattcacagataagtacttaaagaacagacagtttacttggcctaaaaatattttgatgtttactcaaaaagtacctcttcaggtcttgagaacatggaaaagaattgagtgcttttaaatactttttagaaagtaatcataaaagtaaattgaatttcaaacctatttggcttctgttttgtgaacctttgaactatatgtatgtgtataagggtatacacatacatatatggcatataacaagtgtacacatatacacataacaagtgtagaagtatatattacatacatacactcactctgtctggtataggctaattttgaagaactcccataagtttctgctgcttctcccataactgctgccaccaccatcagaattcataatcaaacctaacctttttgtttggggcaccaaatctgaagacaaaattaatttgcaccagtaaacttcaagctgctttctttcttgaaaactaaacgtttaacgtataatgtctgtttggatactgttccaaattgttgattgcatgtggttaatgttgcattagagcactttgcaattgcataattcattaatgttttgtgagcttgcatttgtgagttattggatgatcagactgaattttgtcaagtatcacattgtacatcttgcctagatgtcgatgactgcaagtaataatacagtttataatgaaactatctacaattcttgttttagcacatctgttatccgtaaaacacctgtaactagcttttttaatttattatttgaattttaggatagcgaatcactaatttttagttgctgaggttggcattttagtgattattaagcacttctgtcagtctttgaaaaaagaacgtattttttgtgctttgaagatctctgaagaatttcttttataatagaatgggcatgtattgtaacagttttatgtcaaatgatctgtgctgtagaaaaacattaacccttgttcaaaaaagaaatggataaacttggcctttctaagtggtaagaatgacctgtcactataatatactgtatgtttacattttatttaaatttaatctcttatgtatagggtgataaccttccccagaaacaacagtgattgcgattgttttctagaaacttctttaaagtgccacatttggcagtacaaatgagtctgagtgtaatagcccagagatttatatatagttgaatgtctaaaatggtaaaatgtgccactgtgtcaagttacagtggcttatgtttttcatagtaattcaaatgaacttcctatttttgatagtaaatgtcatttaatagtatacttgccatttgagcctcactgcaaaattagtgcagaggagaaaacaatttttaatgtaatcttgattttacctcatatactgtacattccaaaaactctaaactttttaaagattatagatacactaccaaacatatcaccttaaaattgtataaggctgaatgaacttcatacaaatgaaaaaaatctcataaaaatacataaactatgtagcaaaagtatctgtaaaatccatggaaaataaaagttgtatcattctttttgagatacgtttattgtattcatatatattcattatttgctacctgtttaagaaagtgaaatgttatggtctcccctcttccaatgagcttaaaacatttttcccaacagtatataaatcttcaacatgagaggatgtatatttattatataaagcccagtaaagaataaaattagaagttttatcct

SEQ ID NO: 82 - DNA, 1876 bp, Homo sapiens
agttgcactgtagcctcggcagtgaaccgggaggtactaccaggtcgccgtcgttgctccgctcgctctgagagagcatggccctgagaggcgtctccgtgcggctgctgagccgcggacccggcctgcacgtccttcgcacgtgggtctcgtcggcggcgcagaccgagaaaggcgggagaacacagagccaactggctaagtcctcgcgtcccgagtttgactggcaggacccgctggtgctggaggagcagctgaccacagatgagatcctcatcagggacaccttccgcacctactgccaggagagactcatgcctcgcatcctgttggccaatcgcaacgaagagtctggctctgttgcccaggctggagtgcagtggcacgatcttggctcactgcaaattctgcctcccaggctcaagcgattctcctgcctccacccctctagtagctgggattacaggatatggctgtgctggggtttcgtctgtggcctatgggctcctggcccgagagctggagcgggtggacagtggctacaggtcggcgatgagtgtccagtcctccctcgtcatgcaccctatctatgcctatggcagcgaggaacagcggcagaagtacctgccccagctggccaagggggagctcctgggctgcttcgggctcacagagcccaacagcggaagtgaccccagcagcatggagaccagagcccactacaactcatccaacaagagctacaccctcaatgggaccaagacctggatcacgaactcgcctatggccgatctgtttgtagtgtgggctcggtgtgaagatggctgcattcggggcttcctgctggagaaggggatgcggggtctctcggcccccaggatccagggcaagttctcgctgcgggcctcagccacaggcatgatcatcatggacggtgtggaggtgccagaggagaatgtgctccctggtgcatccagcctggggggtcccttcggctgcctgaacaacgcccggtacggcatcgcgtggggcgtgcttggagcttcggagttctgcttgcacacagcccggcagtacgccctcgacaggatgcagtttggtgtcccactggccaggaaccagctgattcagaagaagctggcagacatgctcactgagattaccctgggccttcacgcctgcctgcagctcggccgcttgaaggaccaggacaaggctgcccccgagatggtttctctgctgaagaggaataactgtgggaaagccctggacatcgcccgccaggcccgagacatgctgggggggaatgggatttctgacgagtatcacgtgatccggcacgccatgaacctggaggccgtgaacacctacgaaggtacacatgacattcacgccctgatccttgggagagctatcacgggaatccaggcgttcacggccagcaagtgagccgctccatcaggggcccgaaactctcaagcccctttctggagagatgcctggctggaccgtaggagcgctgtgctctgagcttagaaagggaggtggcggatggagtgggaagtgagagacactgatttttaaatatcaaaatttcccttctgaagtcgttcagatgtgttccttaaaaagaagatggaattctctgtagagcgtctcaatccacttttaaccatggatgagagcagactccatttaccctgaaatagcagcttctcttgagaggagagtgacatggaagcaactccgtctgctgcagctgaccccctcacactgagttcacagtgcgccctccctccctcccatctgggggtagtgccttatgctgggtgttggagcagagtgagggagaggaaaataaagacctgcacatctg

SEQ ID NO: 83 - DNA, 1200 bp, Homo sapiens
agtcccagctcagagccgcaacctgcacagccatgcccgggcaagaactcaggacggtgaatggctctcagatgctcctggtgttgctggtgctctcgtggctgccgcatgggggcgccctgtctctggccgaggcgagccgcgcaagtttcccgggaccctcagagttgcactccgaagactccagattccgagagttgcggaaacgctacgaggacctgctaaccaggctgcgggccaaccagagctgggaagattcgaacaccgacctcgtcccggcccctgcagtccggatactcacgccagaagtgcggctgggatccggcggccacctgcacctgcgtatctctcgggccgcccttcccgaggggctccccgaggcctcccgccttcaccgggctctgttccggctgtccccgacggcgtcaaggtcgtgggacgtgacacgaccgctgcggcgtcagctcagccttgcaagaccccaggcgcccgcgctgcacctgcgactgtcgccgccgccgtcgcagtcggaccaactgctggcagaatcttcgtccgcacggccccagctggagttgcacttgcggccgcaagccgccagggggcgccgcagagcgcgtgcgcgcaacggggaccactgtccgctcgggcccgggcgttgctgccgtctgcacacggtccgcgcgtcgctggaagacctgggctgggccgattgggtgctgtcgccacgggaggtgcaagtgaccatgtgcatcggcgcgtgcccgagccagttccgggcggcaaacatgcacgcgcagatcaagacgagcctgcaccgcctgaagcccgacacggtgccagcgccctgctgcgtgcccgccagctacaatcccatggtgctcattcaaaagaccgacaccggggtgtcgctccagacctatgatgacttgttagccaaagactgccactgcatatgagcagtcctggtccttccactgtgcacctgcgcggaggacgcgacctcagttgtcctgccctgtggaatgggctcaaggttcctgagacacccgattcctgcccaaacagctgtatttatataagtctgttatttattattaatttattggggtgaccttcttggggactcgggggctggtctgatggaactgtgtatttatttaaaactctggtgataaaaataaagctgtctgaactgtt

SEQ ID NO: 84 - DNA, 1646 bp, Homo sapiens
attgcattcctgggcattgctaactagtgaagtataccagatggaaatgtcttcgaagctgtccctttaaaactcgagcaagctaccaggcaaactccgcctccagggaggttccttattaaataggagccaactggctgggtcggggctcaataccccaagcaatacctgcaactgaggattcttcccggggagaccgcagcccatcggcatggctcaagagtttgtgaactgcaaaatccagcctgggaaggtggttgtgttcatcaagcccacctgcccgtactgcaggagggcccaagagatcctcagtcaattgcccatcaaacaagggcttctggaatttgtcgatatcacagccaccaaccacactaacgagattcaagattatttgcaacagctcacgggagcaagaacggtgcctcgagtctttattggtaaagattgtataggcggatgcagtgatctagtctctttgcaacagagtggggaactgctgacgcggctaaagcagattggagctctgcagtaaccacagaacaggccccatgctgacgtccctcctcaagagctggatggcattgcaaatgatgacagcacttctggtggatgaatttgggggcacaaacagcttttttcctcttttggctcagtatttaaaagtggaccaacttgctcttaatcacagggccaagaaggttgacgggccatcttggttttcttctggatgtgctctttggttttcagaagactgtgacaagttctggcccaggattcgctcactgaccctcaattgtcctctttggcatgcgtttcttactgttctccatgtgtcggcatgtctctacctctaagccagtgtttttcaactatgtttatccagactccttctccacaatgatgaatccacagttggttatctgctactgcccattagctaaaatcattttgctgcttgactttatggagtttgtattatgaaatcagtgggtattttgaatgtgttctttctaactacatgcatctctccactcaactccaccccatcccatcccaccttgaaaatcactgctctgaaccagtgttctccaccttgtcctccacagatctcataggaaatgttcaacaattctgtgaaaggtcacaggacccaattggagaaatcatatgaaaagcatagttggtcttggtgtcatatggatcagaggcacaagtgcagaggctgtggtcatgcggaacactctgttatttaagatggctatccagataatcctgaacactgtgtatttattttatttagactaccagcaaagattaaagcatgaaatgtaaaacatctgataaaacttacagccccctacaccaagagtgtatctgtgaaagagctcctacactttgaaaacttaagaatcccttatcatgaagtttgcctgttctagaattgtaagattgttaatttccttcaatctctagtgacaacacttaatttcttttctaataaaaaaaacctatagatgattcagtgatttttgtccaattcatttgcatgttctcaagacattaaggaatgttatgcgaaatacactaacttaaaactgtgtttatatttggccctgccattataaataaagacacgtgctgctgtc

SEQ ID NO: 85 - DNA, 3272 bp, Homo sapiens
aataggaagcgctcttaaagcggcagtgagggtggctgcgtgtttccggaagacgtggcggctctcgcctgggctgtttcccggcttcatttctcccgactcagcttcccaccctgggctttccgaggtgctgtcgccgctgtccccaccactgcagccatgatctccttaacggacacgcagaaaattggaatgggattaacaggatttggagtgtttttcctgttctttggaatgattctcttttttgacaaagcactactggctattggaaatgttttatttgtagccggcttggcttttgtaattggtttagaaagaacattcagattcttcttccaaaaacataaaatgaaagctacaggtttttttctgggtggtgtatttgtagtccttattggttggcctttgataggcatgatcttcgaaatttatggattttttctcttgttcaggggcttctttcctgtcgttgttggctttattagaagagtgccagtccttggatccctcctaaatttacctggaattagatcatttgtagataaagttggagaaagcaacaatatggtataacaacaagtgaatttgaagactcatttaaaatattgtgttatttataaagtcatttgaagaatattcagcacaaaattaaattacatgaaatagcttgtaatgttctttacaggagtttaaaacgtatagcctacaaagtaccagcagcaaattagcaaagaagcagtgaaaacaggcttctactcaagtgaactaagaagaagtcagcaagcaaactgagagaggtgaaatccatgttaatgatgcttaagaaactcttgaaggctatttgtgttgtttttccacaatgtgcgaaactcagccatccttagagaactgtggtgcctgtttcttttctttttattttgaaggctcaggagcatccataggcatttgctttttagaaatgtccactgcaatggcaaaaatatttccagttgcactgtatctctggaagtgatgcatgaattcgattggattgtgtcattttaaagtattaaaaccaaggaaaccccaattttgatgtatggattacttttttttgtaaacatggttaaaataaaacttttgtggttcttctgaatcttaatatttcaaagccaggtgaaaatctgaactagatattctttgttggaatatgcaaaggtcattctttactaacttttagttactaaattatagctaagttttgtcagcagcatactccggaaagtctcatacttcttgggagtctgccctcctaagtatctgtctatatcattcattacgtgtaagtatttaacaaaaaagcattcttgaccatgaatgaagtagtttgtttcatagcttgtctcattgaatagtattattgaagatactaaatgatgcaaaccaaatggattttttccatgtcatgatgtaatttttctttcttctttcttttttttaaattttagcagtggcttattatttgtttttcataaattaaaataacttttgataatgtttactttaagacatgtaacatgttaaaaggttaaacttatggctatttttaaagggctattcatttaatctgagttttcccttattttcagctttttcctagcatataatagtcattaagcatgacatatccttcatatgatcactcatcttgagttaattagaaaatacctgagttcacgtgctaaagtcatttcactgtaataaactgactgtggtttcttaagaacatgacactaaaaaaaaagtgttttttttccaccgttgctgattattagacagtaggaaatagctgttttctttagttttacaagatgtgacagctttagtggtagatgtagggaaacatttcaacagccatagtactatttgttttaccactgattgcactgttttgtttttttaacagttgcaaagctttttaatgcataaaagtataattgaaatctgtggtatttatttacaaacatgtctacaaaaatagattacagcttattttatttttagttaaatctcttaatacacagagaactcccaatcttgctcatctaaataaggaaagacttggtgtatagtgtgatggtttagtcttaaggattaagacatttttggtacttgcatttgacttacgatgtatctgtgaaaatgggatgatattgacaaatggagactcctacctcaatagttaatggaataataagaggctactgttgtgtctaatgttcttcaaaaaagtaatatcctcacttggagagtgtcaaatacatactttgaggattgactttatataaggtgccctgtagaactctgttacacatatttttgacccatattatttacaatgtcttgataattctacctttttagagcaagaatagtatctgctaatgtaagggacatctgtatttaactcctttgtagacatgaatttctatcaaaatgttctttgcactgtaacagagattccttttttcaataatcttaattcaaaagcattattagacttgaaagggtttgataatctcccagtccttagtaaagattgagagaggctggagcagttttcagttttaaatgagtctgcagttaatatcaaatgtgagtttgggactgcctggcaacatttatatttcttattcagaacccttgatgagactatttttaaacatactagtctgctgatagaaagcactatacatcctattgtttctttctttccaaaatcagccttctgtctgtaacaaaaatgtactttatagagatggaggaaaaggtctaatactacatagccttaagtgtttctgtcattgttcaagtgtattttctgtaacagaaacatatttggaatgtttttcttttccccttataaattgtaattcctgaaatactgctgctttaaaaagtcccactgtcagattatattatctaacaattgaatattgtaaatatacttgtcttacctctcaataaaagggtacttttctattaattggtggtcaagtatatctgtgttatgaagttctaaaagctaatttagcattgcaaaataacctcatttttaaaaaattagccttatatgcagtgttctatttatcaaatgatcttcacatctttcatttccaaattgttgaaatgtactaatgaatacaaatagacttcaagtaagcaaaaatgttcttaattttgaaaactgtaaaataaagtcacttaccttgggcaatatgctatttttt

SEQ ID NO: 86 - DNA, 14796 bp, Homo sapiens
tccgcccctcactgcttcgttaggttgtgcgtcatttgcttttcgcttcgcgtagggtgaagctgtagctacttcggctttggtgggagggaggaggggtctggaaagggctgggctcaggcttttcccgtccggtagaggttctcgcgggatcgcgcggaggcggcggtggctcggttactgactgcagtagccgcggaggcggcggcaaggtcttcggctcgtgccgttctaagccggagaattctcgcgggagcagggttacgtcctcgtgggattcgttggcggtggctgaggtcctccagcagcctgacctgagtgggttagtgatccagagaaaccagcaggccaacttggtcaggaaggttcgggaagctgttggagcagtgtggggaatttcccaccaggatgagtatgattggctgtgattttagatcgtaaagctgaaaattgaaatcatgaaagtagacaggactaaactgaagaagacacctactgaggctcctgcagactgcagagccttaatagacaaactcaaagtttgtaatgatgagcaacttctcttggaactgcagcagatcaaaacatggaacattggaaagtgcgagttatatcactgggtggacctgttggaccgcttcgatggaatactggcagatgctggacagacagtggagaatatgtcatggatgctcgtatgtgataggccagaaagagagcaactgaaaatgcttctcttggctgtgttgaacttcacagccttgctcattgagtacagcttttcccggcatctgtacagttccatagagcatttgacaactttattggcttcctctgatatgcaagtggtgctggcagtcctcaatctcctatatgtatttagcaaaagatcaaactacatcactcgtctgggatctgacaagaggaccccgctgctaactcggctacaacatttggcagagagctggggtggaaaggagaatggctttggacttgcagaatgttgcagagacttgcatatgatgaaatatccacccagtgcaactacactacactttgaattctatgcagatcctggggccgaggtcaaaattgagaaaaggacaactagtaacacactacattatattcacatagagcaacttgacaagatttcagaaagcccttctgaaatcatggaatctcttaccaaaatgtacagcattcctaaggataagcagatgctgttatttacacacatacgactggcccatggcttttctaatcacaggaagcgattgcaggcagttcaggccagactgcatgcaatatctatattagtgtattccaatgccttgcaggaatcagcaaacagtatcttgtataatggcttgatagaggagttggtagatgtccttcagataacggataagcagcttatggagattaaagcagcttctttacgaacattaacatcaattgtccacttggagagaactcccaaactcagcagtattattgactgtactggaactgcctcctaccatggatttttgccagtgcttgtaaggaactgtatccaggccatgattgatccttccatggatccataccctcaccagtttgccactgctctcttctcttttttataccatctggccagctacgatgctggtggtgaagccttggtctcctgtggaatgatggaagccttattgaaggtcataaagtttcttggcgatgaacaggaccagataacatttgtcaccagagccgtcagagtggttgaccttatcaccaacctggatatggcagcttttcaatcccatagtggactttctatcttcatttatagacttgagcatgaagtagatttgtgccgaaaagaatgtccgtttgtgatcaagccaaagatccagagacccaatactacacaagaaggagaggaaatggaaactgatatggatggagtccagtgtattccacaacgagcagcacttctgaaatccatgttgaatttcctcaagaaggccatccaagaccctgctttctcagatggcatacgacatgtgatggatggttctctgcctacctccctgaaacacatcatcagcaatgcagaatactatggcccatcactcttcctcctagctactgaagtggtgactgtgtttgtatttcaagaaccatcactgctctcctcactccaggacaatggattgacagatgtcatgctgcatgcactgcttatcaaagatgttcctgctacccgtgaagtccttggctccctcccaaatgtattcagtgcactctgtttgaatgcccgaggtcttcagtcttttgttcagtgtcagccttttgaacgcctcttcaaagttcttctgtctccagattacctcccagccatgcggaggaggagaagttctgatccccttggggatactgcatccaacctggggagtgctgtcgatgagctcatgagacatcagcccacccttaaaacagatgcaacgactgccatcatcaagttacttgaagaaatctgtaatcttggaagggaccccaaatacatctgtcagaagccatcaatccagaaggcagatggcactgccactgctcctcccccaaggtctaatcatgccgcagaagaagcctctagtgaggatgaggaggaagaggaagtacaggccatgcagagctttaattctacccagcaaaatgaaactgagcctaatcagcaggttgttggtacagaggaacgtattcctattcccctcatggattacatccttaatgtgatgaaatttgtggaatctattctgagcaacaatacaacagatgaccactgccaggaatttgtgaatcagaaaggactgttgcctttggttaccattttgggtcttcccaatctgcccattgactttcccacatctgctgcctgtcaggctgttgcaggtgtctgcaaatccatattgacactgtcacatgaacccaaagtccttcaagagggtctccttcagttggactccatcctctcctccctggagcccttacaccgccccattgaatcccctgggggctcagtgttgttgcgagaactggcttgcgcaggcaatgttgctgatgctaccctctcagcccaggccacacctctgctgcatgcactcactgctgcccatgcctacatcatgatgtttgttcatacttgcagagttggacagagtgaaattcgttccatctccgtaaaccagtggggctctcaattgggtctgagtgttttgagcaagctgagccagttatactgttccctggtgtgggaaagcactgtcctcctctctctgtgtaccccaaacagcctaccatctgggtgtgaatttggccaggcagatatgcagaaactggttccaaaggatgagaaggcaggtacgacccagggcggaaaaagatcagatggggaacaggatggagcagctggaagtatggatgcttctacccagggcttattagaaggcattgggctagatggtgacacattggctcccatggagacagatgaacctactgcttcagactctaagggcaaatctaaaatcacaccagcaatggctgccagaattaagcaaatcaagcctttgttatcagcttcctccagattaggccgagcacttgctgagctatttggacttcttgttaaactttgtgtgggatctcctgtccgccagagaaggagccatcatgctgccagcaccactacagcaccgacacctgccgcgcgatcaacagcctcagctctcactaagctcttgactaaggggttatcttggcagcccccaccatatacacctactccccgattcaggctgacattcttcatctgttcagttggtttcacatccccaatgctgtttgatgagaggaagtatccctaccacctcatgctgcaaaaatttctctgctccggaggccacaatgctctttttgaaactttcaactgggctctgtccatgggaggtaaagttcctgtttctgagggattggaacactcagacttgcctgatggcacaggagaattcctagatgcctggcttatgctggtggagaagatggtgaatcccaccacggtgcttgaatctccacattcgctgcctgccaaattgcctggaggtgtccagaactttccccagttcagtgcactgcgcttccttgtggtaactcagaaagcagcctttacttgcatcaaaaacttatggaaccggaaacccctgaaggtatatggtggacgaatggctgaatcgatgctggccattctatgccacatcctccgaggagaacctgtgattcgagagagactaagcaaggagaaggaggggtctcgaggagaagaggatacagggcaagaggaaggtggctcccgccgggaacctcaagtcaaccagcaacaactgcaacagctcatggacatgggcttcacaagggaacatgcaatggaggcactgttgaacaccagcaccatggagcaggccacagagtaccttttaacccaccctcctccaatcatgggaggagttgttcgggatctcagcatgtctgaagaggaccagatgatgagagcaattgctatgtctctgggacaggatattccaatggatcaaagggcagagtcacctgaggaagttgcttgccggaaggaggaagaggaacggaaagctcgggaaaagcaggaggaggaagaggctaaatgtctagagaagttccaggatgctgacccgttggaacaagatgagctccacactttcacagatactatgttgccaggctgcttccaccttcttgatgagctgccagacacagtataccgtgtgtgtgacctgatcatgacagcaatcaaacgtaatggagcagattatcgtgacatgattctgaagcaagtagtcaatcaggtgtgggaagctgctgatgtattgatcaaagctgctcttcccctgacaacaagtgacacaaaaaccgtgtcagagtggataagtcagatggccacactgccccaggcctccaatttggctactagaatcttgcttttaacgctactttttgaggagttgaagctaccttgtgcttgggtggttgaatcaagtggcatccttaatgtcctaatcaaactcttggaagtggttcagccctgcctccaggcagccaaggagcagaaggaagtccagaccccaaagtggatcacaccagtgttgctcctgattgatttctatgaaaagacagccatctcctcaaaaaggagagcccagatgactaagtacctgcaatccaacagcaacaactggcgctggtttgatgatcgctctgggcgttggtgtagttacagtgcaagcaacaatagcactattgattctgcctggaaatctggagagacaagcgtgcgattcactgcaggccgaagaagatacacggtccaattcactacaatggtgcaggttaatgaggaaacagggaaccgacgccctgtgatgctgactctcctcagggtacctcggctgaataaaaattcaaaaaacagcaatggacaggaactagagaagacgctggaagaaagcaaagaaatggatatcaaacgtaaagaaaataaaggcaatgatacccctttggccctagagagtacaaacactgaaaaggagacaagcctggaggaaacaaaaatcggggagatcctgatccagggcttgacagaagatatggtgactgttttaatccgggcctgcgtgagcatgctgggagtccctgtggacccagatactttgcatgccacccttcgtctctgtctgaggctcacccgggaccacaaatatgccatgatgtttgcagaactgaagagtacccgcatgatcttgaatttgacccagagctcaggcttcaatgggtttactcccctggtcacccttctcttaagacacatcattgaggacccctgtacccttcgtcataccatggaaaaggttgttcgctcagcagctacaagtggagctggtagcactacctctggtgttgtgtctggcagcctcggctctcgggagatcaactacatccttcgtgtccttgggccagccgcatgccgcaatccagacatattcacagaagtggccaactgctgtatccgcatcgcccttcctgcccctcgaggctcaggaactgcttcagatgatgaatttgagaatcttagaattaaaggccctaatgctgtacagctggtgaagaccacccctttgaagccctcacctctgcctgtcatccctgatactatcaaggaagtgatctatgatatgctgaatgctctggctgcataccatgctccagaggaagcagataaatctgatcctaaacctggggttatgacccaagaggttggccagctcctgcaagacatgggtgatgatgtataccagcagtaccggtcacttacgcgtcagagcagtgactttgatacgcagtcaggtttttccattaatagtcaggtctttgctgcagatggtgcctccactgagacttccgcatctgggacctcccaaggagaggcttcaactccagaggagtctcgagatgggaagaaagataaagaaggggaccgggcctctgaggaaggcaaacagaaaggcaagggcagcaaacctttaatgcctacctccactatccttcgtcttctggcagagttggtgaggtcctatgttggtattgctaccctgattgccaactacagctacactgtgggccagtctgaactgatcaaagaggactgcagtgtgctagcttttgttctggaccacctgctcccacatacccagaatgcagaagacaaggacacccctgccttggcccgcctgttcctcgcaagcctggctgctgcagggagtggcacagatgcccaggtggccctagtgaatgaagtaaaagcagcccttggacgggcactggctatggctgagagtacagagaaacatgccaggcttcaggcagtgatgtgtatcatcagtactatcatggagtcctgcccctccacctccagcttctacagcagtgccacagcgaagacccagcacaatggcatgaacaacatcattcggcttttcctgaagaagggactggttaatgacctggccagagtacctcacagcttagacctgtccagtcccaacatggccaacacagtcaatgctgctctgaagcctttggaaacactttcccggattgtgaaccagcccagtagcctttttggcagcaagagtgcttctagcaagaacaagtctgagcaggatgcccaaggagcctctcaagattccagtagcaaccagcaggacccaggcgagcctggggaagcagaagtgcaggaggaggatcatgatgtcactcagacagaggtggcagatggggatatcatggatggggaggctgaaaccgactcagtggtgattgctgggcagcctgaggtgctcagttcacaagagatgcaggttgagaatgagctggaggacctgatagatgagttgcttgagagggatggcggatctgggaacagtacaattatagtgagcagaagtggagaggatgaatcacaagaggacgtgctgatggatgaagctccttccaacctcagccaagcttccaccttgcaggccaaccgagaagattccatgaatatcctggaccctgaggatgaggaggagcacactcaggaagaggacagcagtggcagtaacgaggatgaggatgatagtcaggatgaagaggaggaggaggaggaagatgaggaagatgatcaggaggatgatgaaggtgaagagggagatgaagacgatgacgacgatggctctgagatggaattggatgaggattatcctgatatgaacgcttctcccttggtccgatttgagcgctttgaccgggaggatgatctcatcattgagtttgacaacatgttctccagtgctacagacatccccccatccccaggaaatatccctaccacccatccactgatggtgcgccatgcagaccacagttctctgacactgggcagtggctcttcaacaactcgtctcacccagggcatcgggcgcagtcagaggaccctaaggcagctgacggccaatactggccacaccattcatgttcactaccctgggaatcgccagcccaaccctcctcttatactgcagaggttgcttggtccctcagctgctgctgacatccttcagctgagcagcagccttcccctacaaagccggggtcgggcccgcctcctggtaggcaacgatgacgtccacatcatcgcccgttctgatgatgagctgctggatgactttttccatgatcagagcacagctaccagccaagcaggaaccctgtccagcatccccacagccctgacccgctggacagaagaatgcaaagttctcgatgctgagagcatgcatgactgtgtttcagtggttaaagtgtccattgtcaatcacctggaattcctgagggatgaggagctggaagaaaggcgagagaagcgcaggaaacaactggctgaggaagaaacaaagataactgataaaggcaaagaagataaggagaacagggatcagagtgcacagtgtactgcatctaagtcaaatgactccactgaacagaatctctcagatgggacgcctatgcctgacagctacccaacaaccccatcttcaactgatgcagctacatctgagtccaaggagacccttggcactctgcaatcctcacaacagcaaccaacactcccaaccccaccagctttgggagaggttcctcaggagctgcagtctccagctggagaagggggcagctctacacagctattgatgcctgtagagccagaggaattgggtcccacaaggccaagtggggaagcagaaacaactcagatggagttatccccagctcccactataacctcactttccccagagagagctgaggattctgatgcactgacggctgtcagcagtcagctagaaggctctcctatggatacaagcagcctggcttcctgtaccttagaggaggctgtgggtgacacttcagcagctggcagttctgagcagcccagagcaggcagctccactcctggggatgccccaccagctgtggcggaagtgcaaggcaggagtgatgggtcaggggaatctgcccagccacctgaggacagctccccacctgcatcctctgagagctcttccaccagagattctgccgtggccatttctggagcagattcccgaggaatcctagaagagccgttgccttcaacaagcagtgaagaagaagatccccttgcgggtatcagtctccctgaaggtgtggacccctcttttctggctgccctgcctgatgacatccgtcgggaagttctacagaaccagctaggcattcgtccaccaacccggactgccccctccacaaatagctcagcgcctgcagtggtggggaatcctggtgtgactgaagtgagccctgagtttctggctgccctgcctccagccattcaggaggaagtactggcacagcagagagctgagcagcagcgacgagaactagcacagaatgccagctcagacacccctatggaccctgtgaccttcatccagactctgccctcagacctgcgccgtagtgtcctagaggatatggaggacagtgtgttagctgtgatgccacctgacattgcagctgaggctcaagccctgagacgagagcaagaagcccggcagcgacagctcatgcatgagcgtctgtttgggcacagtagcacctccgcactctctgctattctccgaagcccggctttcaccagtcgcttaagtggcaaccgtggggtccagtatactcgccttgctgtgcagagaggtggcaccttccagatggggggtagcagcagccataacaggccttctggcagtaatgtagatactctcctccgcctccgaggacggctccttctggaccacgaagccctttcttgtctcttggtcctactttttgtggatgagccaaagctcaatactagccgtctacaccgagtactgagaaatctctgctaccatgcccagacccgccactgggtcatccgcagtctgctctccatcttgcagcgcagcagtgagagtgagctatgcattgaaacacccaaactcactacaagtgaggaaaagggcaaaaagtcgagcaagagctgtgggtcaagtagccatgagaaccgtcccctggacctgctacacaagatggagtcaaagagctccaaccagctttcctggctctcagtatccatggatgcagccctaggctgcaggactaatatatttcagatccagcgttcaggggggcgtaaacataccgagaagcatgcaagcggtggctccaccgtccacatccatccccaagctgctcctgttgtctgcagacacgttttggatacactcattcaattggccaaggtatttcccagccacttcacacagcagcggaccaaagaaacaaactgtgagagtgatcgggaaaggggcaataaggcctgtagcccatgctcctcacagtcctccagcagtggcatttgcacagacttctgggacttattggtaaaactggacaacatgaatgtcagccggaaaggcaagaactccgtgaagtcagtgccagtgagcgctggcggtgagggggaaacctctccatacagcctcgaggcctctccactggggcagctcatgaacatgttgtcacacccagtcatccgccggagctctctcttaactgagaaactcctcagactcctttctctcatctcaattgctctcccagaaaacaaggtgtcagaagcacaggctaattctggcagcggtgcttcctccaccaccactgccacctcaaccacatctaccaccaccaccactgccgcctccaccacgcccacaccccctactgcacccacccctgtcacttctgctccagccctggttgctgccacggctatttccaccattgtcgtagctgcttcgaccacagtgactacccccacgactgctaccactactgtttcaatttctcccactactaagggcagcaaatctccagcgaaggtgagtgatgggggcagcagcagtacagactttaagatggtgtcctctggcctcactgaaaaccagctacagctctctgtagaggtgttgacatcccactcttgttctgaggaaggcttagaggatgcagccaacgtactactgcagctctcccggggggactctgggacccgggacactgttctcaagctgctactgaatggagcccgccatctgggttataccctttgtaaacaaataggtaccctgctggccgagctgcgggaatacaacctcgagcagcagcggcgagcccaatgtgaaaccctctctcctgatggcctgcctgaggagcagccacagaccaccaagctgaagggcaaaatgcagagcaggtttgacatggctgagaatgtggtaattgtggcatctcagaagcgacctttgggtggccgggagctccagctgccttctatgtccatgttgacatccaagacatctacccagaagttcttcttgagggtactacaggtcatcatccagctccgggacgacacgcgccgggctaacaagaaagccaagcagacaggcaggctaggttcctccggtttaggctcagctagcagcatccaggcagctgttcggcagctggaggctgaggctgatgccattatacaaatggtacgtgagggtcaaagggcgcggagacagcaacaagcagcaacgtcggagtctagccagtcagaggcgtctgtccggagggaggaatcacccatggatgtggaccagccatctcccagtgctcaagatactcaatccattgcctccgatggaaccccacagggggagaaggaaaaggaagaaagaccacctgagttacccctgctcagcgagcagctgagtttggacgagctgtgggacatgcttggggagtgtctaaaggaactagaggaatcccatgaccagcatgcggtgctagtgctacagcctgctgtcgaggccttctttctggtccatgccacagagcgggagagcaagcctcctgtccgagacacccgtgagagccagctggcacacatcaaggacgagcctcctccactctcccctgcccccttaaccccagccacgccttcctcccttgacccattcttctcccgggagccctcatctatgcacatctcctcaagcctgccccctgacacacagaagttccttcgctttgcagagactcaccgcactgtgttaaaccagatcctacggcagtccacgacccaccttgctgatgggccttttgctgtcctggtagactacattcgtgtcctcgactttgatgtcaagcgcaaatatttccgccaagagctggagcgtttagatgaggggctccggaaagaagacatggctgtgcatgtccgtcgtgaccatgtgtttgaagactcctatcgtgagctgcatcgcaaatcccccgaagaaatgaagaatcgattgtatatagtatttgaaggagaagaagggcaggatgctggtgggctcctgcgggagtggtatatgatcatctctcgagagatgtttaaccctatgtatgccttgttccgtacctcacctggtgatcgagtcacctacaccatcaatccatcttcccactgcaaccccaaccacctcagctacttcaagtttgtcggacgcattgtggccaaagctgtatatgacaaccgtcttctggagtgctactttactcgatccttttacaaacacatcttgggcaagtcagtcagatatacagatatggagagtgaagattaccacttctaccaaggtctggtttatctgctggaaaatgatgtctccacactaggctatgacctcaccttcagcactgaggtccaagagtttggagtttgtgaagttcgtgacctcaaacccaatggggccaacatcttggtaacagaggagaataagaaggagtatgtacacctggtatgccagatgagaatgacaggagccatccgcaagcagttggcggctttcttagaaggcttctatgagatcattccaaagcgcctcatttccatcttcactgagcaggagttagagctgcttatatcaggactgcccaccattgacatcgatgatctgaaatccaacactgaataccacaagtaccagtccaactctattcagatccagtggttctggagagcattgcgttctttcgatcaagctgaccgtgccaagttcctccagtttgtcacgggtacttccaaggtacccctgcaaggctttgctgccctcgaaggcatgaatggcattcagaagtttcagatccatcgagatgacaggtccacagatcgcctgccttcagctcacacatgttttaatcagctggatctgcctgcctatgagagctttgagaagctccgccacatgctactgttggctatccaggagtgctctgaaggctttgggctggcctaataaggccctgcccaactccgtggggttttttttaccattgttggacctggggaggggggagttaaaaaaagaaccagaaagaaattgtcaaaaaccaataaatgaaatccaccaactcaccgtgtgtgtcccagctgccccatcttccccagcgcatacctgttcctcttctcattctctccccgccgcctgtttcctcaccttctctcccctttccatgccgtccatgatccccaccccatgtgttttaaaaaggcagtagcctttgcagggacctgtctgtcccaactgtttgaacagtgtgctcctcagattctgtgttcagaaggatttgctgcattgagacttgaaacctttggataggggaaaaaattatatatatatatatttttttgttctgtttgcatttcttaatttgtgcttggaatgtgttgatgtgcacagctaatgattcaatgcgagacaagattggcgtctgtgttgtggaggtttcaaataaagagcactcttcataactcacttttcacaatggagtttttttcaaacttaaaaaaaaaaacaaaaaactcttaagcacatgctaggcatctggagaaaagatggattctccaggaaaccatccctgccctacccgcttgcccacctgcctccaccactggtgcaacttcctccttcagagtcagtttctgcagtcaggagagatgagcagttcaccaggaattgggggtgggggcatctgttttttttttttagaatgggagctgcacttggggatggtgatggtgttagagattgcagcccaggacaaagcatcaccttgctcaaggggaacaaactgcagcaggttgtacaaaacattcagagagctcacttgacccaaccgagggttttacttggtgagcctttctagtagtcttgagtctggggctcagttttagatttttatttcattaatgtttgtttatttctaataaattttaataagcgagtaatttaactaggtcgccagaagaccattatttttgtttgtctatttttgttgtcgtcactccctctctcgtcatctgtctgccagtctgttcacagatcaccttgtagtcccttgtggtttttactccatccagtgcttaaagctgatctaaggacttcgatggttccagccttcaaagaaaaaataatttaataaaaatttagttagaaaaaataaccccaa

SEQ ID NO: 87 - DNA, 1222 bp, Homo sapiens
attccacgttcttaactgttccattttccgtatctgcttcgggcttccacctcatttttttcgctttgcccattctgtttcagccagtcgccaagaatcatgaaagtcgccagtggcagcaccgccaccgccgccgcgggccccagctgcgcgctgaaggccggcaagacagcgagcggtgcgggcgaggtggtgcgctgtctgtctgagcagagcgtggccatctcgcgctgcgccgggggcgccggggcgcgcctgcctgccctgctggacgagcagcaggtaaacgtgctgctctacgacatgaacggctgttactcacgcctcaaggagctggtgcccaccctgccccagaaccgcaaggtgagcaaggtggagattctccagcacgtcatcgactacatcagggaccttcagttggagctgaactcggaatccgaagttggaacccccgggggccgagggctgccggtccgggctccgctcagcaccctcaacggcgagatcagcgccctgacggccgaggtgagatccagatccgaccactagatcatccttataccgacggggaaacggaggccagagagggcgtgggcgcttgcaccacttccgtcccatccttgcgggtacctggctatgcgggggtgcctaaggagcctggaaaaagcgctcccccgtcgtgcttcctggggaagggggcgttcgctgcgctcggagcggcgtcccttccaacccgccggtctcatttcttctcgttttcacaggcggcatgcgttcctgcggacgatcgcatcttgtgtcgctgaagcgcctcccccagggaccggcggaccccagccatccagggggcaagaggaattacgtgctctgtgggtctcccccaacgcgcctcgccggatctgagggagaacaagaccgatcggcggccactgcgcccttaactgcatccagcctggggctgaggctgaggcactggcgaggagagggcgctcctctctgcacacctactagtcaccagagactttagggggtgggattccactcgtgtgtttctattttttgaaaagcagacattttaaaaaatggtcacgtttggtgcttctcagatttctgaggaaattgctttgtattgtatattacaatgatcaccgactgaaaatattgttttacaatagttctgtggggctgtttttttgttattaaacaaataatttagatggtg

SEQ ID NO: 88 - DNA, 2664 bp, Homo sapiens
gttgctgcggagccaggaggggaagcgatggctgggcccgcgtggatctctaaggtctctcggctgctgggggcattccacaacccaaaacaggtgaccagaggttttactggtggtgttcagacagtaactttaattccaggagatggtattggcccagaaatttcagctgcagttatgaagatttttgatgctgccaaagcacctattcagtgggaggagcggaacgtcactgccattcaaggacctggaggaaagtggatgatcccttcagaggctaaagagtccatggataagaacaagatgggcttgaaaggccctttgaagaccccaatagcagccggtcacccatctatgaatttactgctgcgcaaaacatttgacctttacgcgaatgtccgaccatgtgtctctatcgaaggctataaaaccccttacaccgatgtaaatattgtgaccattcgagagaacacagaaggagaatacagtggaattgagcatgtgattgttgatggagtcgtgcagagtatcaagctcatcaccgagggggcgagcaagcgcattgctgagtttgcctttgagtatgcccggaacaaccaccggagcaacgtcacggcggtgcacaaagccaacatcatgcggatgtcagatgggctttttctacaaaaatgcagggaagttgcagaaagctgtaaagatattaaatttaatgagatgtaccttgatacagtatgtttgaatatggtacaagatccttcccaatttgatgttcttgttatgccaaatttgtatggagacatccttagtgacttgtgtgcaggattgatcggaggtctcggtgtgacaccaagtggcaacattggagccaatggggttgcaatttttgagtcggttcatgggacggctccagacattgcaggcaaggacatggcgaatcccacagccctcctgctcagtgccgtgatgatgctgcgccacatgggactttttgaccatgctgcaagaattgaggctgcgtgttttgctacaattaaggacggaaagagcttgacaaaagatttgggaggcaatgcaaaatgctcagacttcacagaggaaatctgtcgccgagtaaaagatttagattaacacttctacaactggcatttacatcagtcactctaaatggacaccacatgaacctctgtttagaatacctacgtatgtatgcattggtttgcttgtttcttgacagtacatttttagatctggccttttcttaacaaaatctgtgcaaaagatgcaggtggatgtccctaggtctgttttcaaagaactttttccaagtgcttgttttatttattaagtgtctacctggtaaatgttttttttgtaaactctgagtggactgtatcatttgctattctaaaccattttacacttaagttaaaatagtttctcttcagctgtaaataacaggatacagaattaacaagagaaaatgtctaactttttaagaaaaaccttattttcttcggtttttgaaaaacataatggaaataaaacaggatattgacataatagcacaaaatgacactcttctaaaactaaatgggcacaagagaattttcctgggaaagttcacatcaaaaagagtgaatgtggtatatttctaaatgatatggaaaatagagacagatttgtcctttacagaaattactgagtgtgaataaaaacttcagatccaagaaatatataatgagagatataatttttgttaataagacaaaggtaatatattggatacaaagacacaaatgtattgtgtgttcaattattttgttgtcttgagatttaatattctttccaagagcttttaatgaagcagagagctagtacttcattttcactggatacattttcagcatcatgagttgtcacagcctctgagcccctgatctgaagccagaagggctgagtgtattgtaaacttattcttgcatgttgctgtctgggaatggaccacactacagcaggtagttctgggggcgatactgccgaaaggcccgaacacatgtattttggctgcaattgaggaacttgggatgctattaattttgtatttcagcaactgccccttctcctatcccaaagcaccaattactgccctctgcctcagcagtaccagtataagatgacattccaaagactggaggcaactcagcctgagttaattcacaaaattatgccatgctggggcttgagcttgagcttgggcttaggcttgggctcagcttttgaccctcaggcatctcctttcccttcctgtcttcctctcccttctcctctgctgcagcatgattttcttaatcttcagacactcactattttcatgaacagttaccctctgtccccacaaccaaagacaactcatggcctcctttggcccttgtgtaacattgcaaacctgtggctttgcaaaatgtacccaggtcacaaggggatttttttttttttagcaatgatatccctgtctgggtcactttttaagcttgtaaccgcccccccagacttataatcttaaatgtattttcctttgtttaagctgctgcttcctctgtttcattggattgtgccagttatcagtggctcttgggttcaaagtaataaagaattccaaaactg

SEQ ID NO: 89 - DNA, 2120 bp, Homo sapiens
acagaccccggtgacggaagtgacgtaaggccggggctggagggcagtgctgggctggtcccgcaggcgctcggggttggagccagcgaccgtcggtagcagcatggctctcctctttctcctaccccttgtcatgcagggtgtgagcagggctgagatgggcaccgcggatctggggccgtcctcagtgcctacaccaactaatgttacaattgaatcctataacatgaaccctatcgtatattgggagtaccagatcatgccacaggtccctgtttttaccgtagaggtaaagaactatggtgttaagaattcagaatggattgatgcctgcatcaatatttctcatcattattgtaatatttctgatcatgttggtgatccatcaaattctctttgggtcagagttaaagccagggttggacaaaaagaatctgcctatgcaaagtcagaagaatttgctgtatgccgagatggaaaaattggaccacctaaactggatatcagaaaggaggagaagcaaatcatgattgacatatttcacccttcagtttttgtaaatggagacgagcaggaagtcgattatgatcccgaaactacctgttacattagggtgtacaatgtgtatgtgagaatgaacggaagtgagatccagtataaaatactcacgcagaaggaagatgattgtgacgagattcagtgccagttagcgattccagtatcctcactgaattctcagtactgtgtttcagcagaaggagtcttacatgtgtggggtgttacaactgaaaagtcaaaagaagtttgtattaccattttcaatagcagtataaaaggttctctttggattccagttgttgctgctttactactctttctagtgcttagcctggtattcatctgtttttatattaagaaaattaatccattgaaggaaaaaagcataatattacccaagtccttgatctctgtggtaagaagtgctactttagagacaaaacctgaatcaaaatatgtatcactcatcacgtcataccagccattttccttagaaaaggaggtggtctgtgaagagccgttgtctccagcaacagttccaggcatgcataccgaagacaatccaggaaaagtggaacatacagaagaactttctagtataacagaagtggtgactactgaagaaaatattcctgacgtggtcccgggcagccatctgactccaatagagagagagagttcttcacctttaagtagtaaccagtctgaacctggcagcatcgctttaaactcgtatcactccagaaattgttctgagagtgatcactccagaaatggttttgatactgattccagctgtctggaatcacatagctccttatctgactcagaatttcccccaaataataaaggtgaaataaaaacagaaggacaagagctcataaccgtaataaaagcccccacctcctttggttatgataaaccacatgtgctagtggatctacttgtggatgatagcggtaaagagtccttgattggttatagaccaacagaagattccaaagaattttcatgagatcagctaagttgcaccaactttgaagtctgattttcctggacagttttctgctttaatttcatgaaaagattatgatctcagaaattgtatcttagttggtatcaaccaaatggagtgacttagtgtacatgaaagcgtaaagaggatgtgtggcattttcacttttggcttgtaaagtacagacttttttttttttttaaacaaaaaaagcattgtaacttatgaacctttacatccagataggttaccagtaacggaacagtatccagtactcctggttcctaggtgagcaggtgatgccccagggacctttgtagccacttcactttttttcttttctctgccttggtatagcatatgtttttgtaagtttatgcatacagtaattttaagtaatttcagaagaaattctgcaagcttttcaaaattggacttaaaatctaattcaaactaatagaattaatggaatatgtaaatagaaacgtgtatattttttatgaaacattacagttagagatttttaaataaagaattttaaaactcg

SEQ ID NO: 90 - DNA, 1009 bp, Homo sapiens
tttgtctcttcctgagaaacgagcaaacctgaaagctactctctcagcttcagagggaaaaaatggttgtagatttctggacttgggagcagacatttcaagaactaatccaagaggcaaaaccccgggccacatggacgctgaagttggatggcaaccttcagctagactgcctggctcaagggtggaagcaataccaacagagagcatttggctggttccggtgttcctcctgccagcgaagttgggcttccgcccaagtgcagattctgtgccacacgtactgggagcactggacatcccagggtcaggtgcgtatgaggctctttggccaaaggtgccagaagtgctcctggtcccaatatgagatgcctgagttctcctcggatagcaccatgaggattctgagcaacctggtgcagcatatactgaagaaatactatggaaatggcacgaggaagtctccagaaatgccagtaatcctggaagtgtccctggaaggatcccatgacacagccaattgtgaggcatgcactttgggcatctgtggacagggcttaaaaagctgcatgacaaagccgtccaaatccctactcccccacctaaagactgggaattcctcacctggaattggtgctgtgtacctcgcaaaccaagccaagaaccagtcagctgaggcaaaagaggctaaggggagtgggtatgagaaattagggcccagtcgagacccagatccactgaacatctgtgtctttattttgctgcttgtatttattgtagtcaaatgctttacatcagaatgatgaaaataggcttgccactttctcttattttaattccatggtagtcaatgaactggctgccactttaatataactgaaaattcattttgagaccaagcaggatcaagtttgtagaataaacactggtttcctagccatcctctgaaaacagtatgaaacatgaccaagtacataatggatttagtaataaatattgtcgaattgct

SEQ ID NO: 91 - DNA, 1944 bp, Homo sapiens
gactccgggtggcaggcgcccgggggaatcccagctgactcgctcactgccttcgaagtccggcgccccccgggagggaactgggtggccgcaccctcccggctgcggtggctgtcgccccccaccctgcagccaggactcgatggaggtacagagctcggcttctttgccttgggaggggagtggtggtggttgaaagggcgatggaattttccccgaaagcctacgcccagggcccctcccagctccagcgttaccctccggtctatcctactggccgagctgccccgccttctcatggggaaaacttagccgcaacttcaatttttggtttttcctttaatgacacttctgaggctctcctagccatcctcccgcttccggaggagcgcagatcgcaggtccctttgcccctggcgtgcgactccctactgcgctgcgctcttacggcgttccaggctgctggctagcgcaaggcgggccgggcaccccgcgctccgctgggagggtgagggacgcgcgtctggcggccccagccaagctgcgggtttctgagaagacgctgtcccgcagccctgagggctgagttctgcacccagtcaagctcaggaaggccaagaaaagaatccattccaatatatggccatgtggctctttggagcaatgttccatcatgttccatgctgctgacgtcacatggagcacagaaatcaatgttagcagatagccagcccatacaagatcgtattgtattgtaggaggcattgtggatggatggctgctggaaaccccttgccatagccagctcttcttcaatacttaaggatttaccgtggctttgagtaatgagaatttcgaaaccacatttgagaagtatttccatccagtgctacttgtgtttacttctaaacagtcattttctaactgaagctggcattcatgtcttcattttgggctgtttcagtgcagggcttcctaaaacagaagccaactgggtgaatgtaataagtgatttgaaaaaaattgaagatcttattcaatctatgcatattgatgctactttatatacggaaagtgatgttcaccccagttgcaaagtaacagcaatgaagtgctttctcttggagttacaagttatttcacttgagtccggagatgcaagtattcatgatacagtagaaaatctgatcatcctagcaaacaacagtttgtcttctaatgggaatgtaacagaatctggatgcaaagaatgtgaggaactggaggaaaaaaatattaaagaatttttgcagagttttgtacatattgtccaaatgttcatcaacacttcttgattgcaattgattctttttaaagtgtttctgttattaacaaacatcactctgctgcttagacataacaaaacactcggcatttcaaatgtgctgtcaaaacaagtttttctgtcaagaagatgatcagaccttggatcagatgaactcttagaaatgaaggcagaaaaatgtcattgagtaatatagtgactatgaacttctctcagacttactttactcatttttttaatttattattgaaattgtacatatttgtggaataatgtaaaatgttgaataaaaatatgtacaagtgttgttttttaagttgcactgatattttacctcttattgcaaaatagcatttgtttaagggtgatagtcaaattatgtattggtggggctgggtaccaatgctgcaggtcaacagctatgctggtaggctcctgccagtgtggaaccactgactactggctctcattgacttccttactaagcatagcaaacagaggaagaatttgttatcagtaagaaaaagaagaactatatgtgaatcctcttctttatactgtaatttagttattgatgtataaagcaactgttatgaaataaagaaattgcaataactggc

SEQ ID NO: 92 - DNA, 3664 bp, Homo sapiens
gagagacgagggcagcggaggaggcgaggagcgccgggtaccgggccgggggagccgcgggctctcggggaagagacggatgatgaacaagctttacatcgggaacctgagccccgccgtcaccgccgacgacctccggcagctctttggggacaggaagctgcccctggcgggacaggtcctgctgaagtccggctacgccttcgtggactaccccgaccagaactgggccatccgcgccatcgagaccctctcgggtaaagtggaattgcatgggaaaatcatggaagttgattactcagtctctaaaaagctaaggagcaggaaaattcagattcgaaacatccctcctcacctgcagtgggaggtgttggatggacttttggctcaatatgggacagtggagaatgtggaacaagtcaacacagacacagaaaccgccgttgtcaacgtcacatatgcaacaagagaagaagcaaaaatagccatggagaagctaagcgggcatcagtttgagaactactccttcaagatttcctacatcccggatgaagaggtgagctccccttcgccccctcagcgagcccagcgtggggaccactcttcccgggagcaaggccacgcccctgggggcacttctcaggccagacagattgatttcccgctgcggatcctggtccccacccagtttgttggtgccatcatcggaaaggagggcttgaccataaagaacatcactaagcagacccagtcccgggtagatatccatagaaaagagaactctggagctgcagagaagcctgtcaccatccatgccaccccagaggggacttctgaagcatgccgcatgattcttgaaatcatgcagaaagaggcagatgagaccaaactagccgaagagattcctctgaaaatcttggcacacaatggcttggttggaagactgattggaaaagaaggcagaaatttgaagaaaattgaacatgaaacagggaccaagataacaatctcatctttgcaggatttgagcatatacaacccggaaagaaccatcactgtgaagggcacagttgaggcctgtgccagtgctgagatagagattatgaagaagctgcgtgaggcctttgaaaatgatatgctggctgttaaccaacaagccaatctgatcccagggttgaacctcagcgcacttggcatcttttcaacaggactgtccgtgctatctccaccagcagggccccgcggagctccccccgctgccccctaccaccccttcactacccactccggatacttctccagcctgtacccccatcaccagtttggcccgttcccgcatcatcactcttatccagagcaggagattgtgaatctcttcatcccaacccaggctgtgggcgccatcatcgggaagaagggggcacacatcaaacagctggcgagattcgccggagcctctatcaagattgcccctgcggaaggcccagacgtcagcgaaaggatggtcatcatcaccgggccaccggaagcccagttcaaggcccagggacggatctttgggaaactgaaagaggaaaacttctttaaccccaaagaagaagtgaagctggaagcgcatatcagagtgccctcttccacagctggccgggtgattggcaaaggtggcaagaccgtgaacgaactgcagaacttaaccagtgcagaagtcatcgtgcctcgtgaccaaacgccagatgaaaatgaggaagtgatcgtcagaattatcgggcacttctttgctagccagactgcacagcgcaagatcagggaaattgtacaacaggtgaagcagcaggagcagaaataccctcagggagtcgcctcacagcgcagcaagtgaggctcccacaggcaccagcaaaacaacggatgaatgtagcccttccaacacctgacagaatgagaccaaacgcagccagccagatcgggagcaaaccaaagaccatctgaggaatgagaagtctgcggaggcggccagggactctgccgaggccctgagaaccccaggggccgaggaggggcggggaaggtcagccaggtttgccagaaccaccgagccccgcctcccgccccccagggcttctgcaggcttcagccatccacttcaccatccactcggatctctcctgaactcccacgacgctatcccttttagttgaactaacataggtgaacgtgttcaaagccaagcaaaatgcacaccctttttctgtggcaaatcgtctctgtacatgtgtgtacatattagaaagggaagatgttaagatatgtggcctgtgggttacacagggtgcctgcagcggtaatatattttagaaataatatatcaaataactcaactaactccaatttttaatcaattattaatttttttttctttttaaagagaaagcaggcttttctagactttaaagaataaagtctttgggaggtctcacggtgtagagaggagctttgaggccacccgcacaaaattcacccagagggaaatctcgtcggaaggacactcacggcagttctggatcacctgtgtatgtcaacagaagggataccgtctccttgaagaggaaactctgtcactcctcatgcctgtctagctcatacacccatttctctttgcttcacaggttttaaactggttttttgcatactgctatataattctctgtctctctctgtttatctctcccctccctcccctccccttcttctccatctccattcttttgaatttcctcatccctccatctcaatcccgtatctacgcacccccccccccccaggcaaagcagtgctctgagtatcacatcacacaaaaggaacaaaagcgaaacacacaaaccagcctcaacttacacttggttactcaaaagaacaagagtcaatggtacttgtcctagcgttttggaagaggaaaacaggaacccaccaaaccaaccaatcaaccaaacaaagaaaaaattccacaatgaaagaatgtattttgtctttttgcattttggtgtataagccatcaatattcagcaaaatgattcctttctttaaaaaaaaaaaatgtggaggaaagtagaaatttaccaaggttgttggcccagggcgttaaattcacagatttttttaacgagaaaaacacacagaagaagctacctcaggtgtttttacctcagcaccttgctcttgtgtttcccttagagattttgtaaagctgatagttggagcatttttttatttttttaataaaaatgagttggaaaaaaaataagatatcaactgccagcctggagaaggtgacagtccaagtgtgcaacagctgttctgaattgtcttccgctagccaagaacctatatggccttcttttggacaaaccttgaaaatgtttatttaaaaaaaaaaaagatgacaaagaaaaacagagagagagaatattggagatgtcctgaattttaatagggtacgcgccattagggctttttgcgctaaaggatgaacatgtactggtttatgtggacaagccattataccaccagactgcaatgccagtttcctctactgcaaacagtgttctgtgacaaaaaaaaaaaaaaaaaaaagaaaaaaaaagaaaaaacagaaatatatccagct

SEQ ID NO: 93 - DNA, 4246 bp, Homo sapiens
attcgcctctgggaggtttaggaagcggctccgggtcggtggccccaggacagggaagagcgggcgctatggggagccggacgccagagtcccctctccacgccgtgcagctgcgctggggcccccggcgccgacccccgctgctgccgctgctgttgctgctgctgccgccgccacccagggtcgggggcttcaacttagacgcggaggccccagcagtactctcggggcccccgggctccttcttcggattctcagtggagttttaccggccgggaacagacggggtcagtgtgctggtgggagcacccaaggctaataccagccagccaggagtgctgcagggtggtgctgtctacctctgtccttggggtgccagccccacacagtgcacccccattgaatttgacagcaaaggctctcggctcctggagtcctcactgtccagctcagagggagaggagcctgtggagtacaagtccttgcagtggttcggggcaacagttcgagcccatggctcctccatcttggcatgcgctccactgtacagctggcgcacagagaaggagccactgagcgaccccgtgggcacctgctacctctccacagataacttcacccgaattctggagtatgcaccctgccgctcagatttcagctgggcagcaggacagggttactgccaaggaggcttcagtgccgagttcaccaagactggccgtgtggttttaggtggaccaggaagctatttctggcaaggccagatcctgtctgccactcaggagcagattgcagaatcttattaccccgagtacctgatcaacctggttcaggggcagctgcagactcgccaggccagttccatctatgatgacagctacctaggatactctgtggctgttggtgaattcagtggtgatgacacagaagactttgttgctggtgtgcccaaagggaacctcacttacggctatgtcaccatccttaatggctcagacattcgatccctctacaacttctcaggggaacagatggcctcctactttggctatgcagtggccgccacagacgtcaatggggatgggctggatgacttgctggtgggggcacccctgctcatggatcggacccctgacgggcggcctcaggaggtgggcagggtctacgtctacctgcagcacccagccggcatagagcccacgcccacccttaccctcactggccatgatgagtttggccgatttggcagctccttgacccccctgggggacctggaccaggatggctacaatgatgtggccatcggggctccctttggtggggagacccagcagggagtagtgtttgtatttcctgggggcccaggagggctgggctctaagccttcccaggttctgcagcccctgtgggcagccagccacaccccagacttctttggctctgcccttcgaggaggccgagacctggatggcaatggatatcctgatctgattgtggggtcctttggtgtggacaaggctgtggtatacaggggccgccccatcgtgtccgctagtgcctccctcaccatcttccccgccatgttcaacccagaggagcggagctgcagcttagaggggaaccctgtggcctgcatcaaccttagcttctgcctcaatgcttctggaaaacacgttgctgactccattggtttcacagtggaacttcagctggactggcagaagcagaagggaggggtacggcgggcactgttcctggcctccaggcaggcaaccctgacccagaccctgctcatccagaatggggctcgagaggattgcagagagatgaagatctacctcaggaacgagtcagaatttcgagacaaactctcgccgattcacatcgctctcaacttctccttggacccccaagccccagtggacagccacggcctcaggccagccctacattatcagagcaagagccggatagaggacaaggctcagatcttgctggactgtggagaagacaacatctgtgtgcctgacctgcagctggaagtgtttggggagcagaaccatgtgtacctgggtgacaagaatgccctgaacctcactttccatgcccagaatgtgggtgagggtggcgcctatgaggctgagcttcgggtcaccgcccctccagaggctgagtactcaggactcgtcagacacccagggaacttctccagcctgagctgtgactactttgccgtgaaccagagccgcctgctggtgtgtgacctgggcaaccccatgaaggcaggagccagtctgtggggtggccttcggtttacagtccctcatctccgggacactaagaaaaccatccagtttgacttccagatcctcagcaagaatctcaacaactcgcaaagcgacgtggtttcctttcggctctccgtggaggctcaggcccaggtcaccctgaacggtgtctccaagcctgaggcagtgctattcccagtaagcgactggcatccccgagaccagcctcagaaggaggaggacctgggacctgctgtccaccatgtctatgagctcatcaaccaaggccccagctccattagccagggtgtgctggaactcagctgtccccaggctctggaaggtcagcagctcctatatgtgaccagagttacgggactcaactgcaccaccaatcaccccattaacccaaagggcctggagttggatcccgagggttccctgcaccaccagcaaaaacgggaagctccaagccgcagctctgcttcctcgggacctcagatcctgaaatgcccggaggctgagtgtttcaggctgcgctgtgagctcgggcccctgcaccaacaagagagccaaagtctgcagttgcatttccgagtctgggccaagactttcttgcagcgggagcaccagccatttagcctgcagtgtgaggctgtgtacaaagccctgaagatgccctaccgaatcctgcctcggcagctgccccaaaaagagcgtcaggtggccacagctgtgcaatggaccaaggcagaaggcagctatggcgtcccactgtggatcatcatcctagccatcctgtttggcctcctgctcctaggtctactcatctacatcctctacaagcttggattcttcaaacgctccctcccatatggcaccgccatggaaaaagctcagctcaagcctccagccacctctgatgcctgagtcctcccaatttcagactcccattcctgaagaaccagtccccccaccctcattctactgaaaaggaggggtctgggtacttcttgaaggtgctgacggccagggagaagctcctctccccagcccagagacatacttgaagggccagagccaggggggtgaggagctggggatccctcccccccatgcactgtgaaggacccttgtttacacataccctcttcatggatgggggaactcagatccagggacagaggccccagcctccctgaagcctttgcattttggagagtttcctgaaacaacttggaaagataactaggaaatccattcacagttctttgggccagacatgccacaaggacttcctgtccagctccaacctgcaaagatctgtcctcagccttgccagagatccaaaagaagcccccagctaagaacctggaacttggggagttaagacctggcagctctggacagccccaccctggtgggccaacaaagaacactaactatgcatggtgccccaggaccagctcaggacagatgccacacaaggatagatgctggcccagggcccagagcccagctccaaggggaatcagaactcaaatggggccagatccagcctggggtctggagttgatctggaacccagactcagacattggcacctaatccaggcagatccaggactatatttgggcctgctccagacctgatcctggaggcccagttcaccctgatttaggagaagccaggaatttcccaggaccctgaaggggccatgatggcaacagatctggaacctcagcctggccagacacaggccctccctgttccccagagaaaggggagcccactgtcctgggcctgcagaatttgggttctgcctgccagctgcactgatgctgcccctcatctctctgcccaacccttccctcaccttggcaccagacacccaggacttatttaaactctgttgcaagtgcaataaatctgacccagtgcccccactgaccagaact

SEQ ID NO: 94 - DNA, 4894 bp, Homo sapiens
cgccgcgggaggcggacgagatgcgagcgcggccgcggccccggccgctctgggcgactgtgctggcgctgggggcgctggcgggcgttggcgtaggagggcccaacatctgtaccacgcgaggtgtgagctcctgccagcagtgcctggctgtgagccccatgtgtgcctggtgctctgatgaggccctgcctctgggctcacctcgctgtgacctgaaggagaatctgctgaaggataactgtgccccagaatccatcgagttcccagtgagtgaggcccgagtactagaggacaggcccctcagcgacaagggctctggagacagctcccaggtcactcaagtcagtccccagaggattgcactccggctccggccagatgattcgaagaatttctccatccaagtgcggcaggtggaggattaccctgtggacatctactacttgatggacctgtcttactccatgaaggatgatctgtggagcatccagaacctgggtaccaagctggccacccagatgcgaaagctcaccagtaacctgcggattggcttcggggcatttgtggacaagcctgtgtcaccatacatgtatatctccccaccagaggccctcgaaaacccctgctatgatatgaagaccacctgcttgcccatgtttggctacaaacacgtgctgacgctaactgaccaggtgacccgcttcaatgaggaagtgaagaagcagagtgtgtcacggaaccgagatgccccagagggtggctttgatgccatcatgcaggctacagtctgtgatgaaaagattggctggaggaatgatgcatcccacttgctggtgtttaccactgatgccaagactcatatagcattggacggaaggctggcaggcattgtccagcctaatgacgggcagtgtcatgttggtagtgacaatcattactctgcctccactaccatggattatccctctttggggctgatgactgagaagctatcccagaaaaacatcaatttgatctttgcagtgactgaaaatgtagtcaatctctatcagaactatagtgagctcatcccagggaccacagttggggttctgtccatggattccagcaatgtcctccagctcattgttgatgcttatgggaaaatccgttctaaagtagagctggaagtgcgtgacctccctgaagagttgtctctatccttcaatgccacctgcctcaacaatgaggtcatccctggcctcaagtcttgtatgggactcaagattggagacacggtgagcttcagcattgaggccaaggtgcgaggctgtccccaggagaaggagaagtcctttaccataaagcccgtgggcttcaaggacagcctgatcgtccaggtcacctttgattgtgactgtgcctgccaggcccaagctgaacctaatagccatcgctgcaacaatggcaatgggacctttgagtgtggggtatgccgttgtgggcctggctggctgggatcccagtgtgagtgctcagaggaggactatcgcccttcccagcaggacgaatgcagcccccgggagggtcagcccgtctgcagccagcggggcgagtgcctctgtggtcaatgtgtctgccacagcagtgactttggcaagatcacgggcaagtactgcgagtgtgacgacttctcctgtgtccgctacaagggggagatgtgctcaggccatggccagtgcagctgtggggactgcctgtgtgactccgactggaccggctactactgcaactgtaccacgcgtactgacacctgcatgtccagcaatgggctgctgtgcagcggccgcggcaagtgtgaatgtggcagctgtgtctgtatccagccgggctcctatggggacacctgtgagaagtgccccacctgcccagatgcctgcacctttaagaaagaatgtgtggagtgtaagaagtttgaccggggagccctacatgacgaaaatacctgcaaccgttactgccgtgacgagattgagtcagtgaaagagcttaaggacactggcaaggatgcagtgaattgtacctataagaatgaggatgactgtgtcgtcagattccagtactatgaagattctagtggaaagtccatcctgtatgtggtagaagagccagagtgtcccaagggccctgacatcctggtggtcctgctctcagtgatgggggccattctgctcattggccttgccgccctgctcatctggaaactcctcatcaccatccacgaccgaaaagaattcgctaaatttgaggaagaacgcgccagagcaaaatgggacacagccaacaacccactgtataaagaggccacgtctaccttcaccaatatcacgtaccggggcacttaatgataagcagtcatcctcagatcattatcagcctgtgccacgattgcaggagtccctgccatcatgtttacagaggacagtatttgtggggagggatttggggctcagagtggggtaggttgggagaatgtcagtatgtggaagtgtgggtctgtgtgtgtgtatgtgggggtctgtgtgtttatgtgtgtgtgttgtgtgtgggagtgtgtaatttaaaattgtgatgtgtcctgataagctgagctccttagcctttgtcccagaatgcctcctgcagggattcttcctgcttagcttgagggtgactatggagctgagcaggtgttcttcattacctcagtgagaagccagctttcctcatcaggccattgtccctgaagagaagggcagggctgaggcctctcattccagaggaagggacaccaagccttggctctaccctgagttcataaatttatggttctcaggcctgactctcagcagctatggtaggaactgctgggcttggcagcccgggtcatctgtacctctgcctcctttcccctccctcaggccgaaggaggagtcagggagagctgaactattagagctgcctgtgccttttgccatcccctcaacccagctatggttctctcgcaagggaagtccttgcaagctaattctttgacctgttgggagtgaggatgtctgggccactcaggggtcattcatggcctgggggatgtaccagcatctcccagttcataatcacaacccttcagatttgccttattggcagctctactctggaggtttgtttagaagaagtgtgtcacccttaggccagcaccatctctttacctcctaattccacaccctcactgctgtagacatttgctatgagctggggatgtctctcatgaccaaatgcttttcctcaaagggagagagtgctattgtagagccagaggtctggccctatgcttccggcctcctgtccctcatccatagcacctccacatacctggccctgtgccttggtgtgctgtatccatccatggggctgattgtatttaccttctacctcttggctgccttgtgaaggaattattcccatgagttggctgggaataagtgccaggatggaatgatgggtcagttgtatcagcacgtgtggcctgttcttctatgggttggacaacctcattttaactcagtctttaatctgagaggccacagtgcaattttattttatttttctcatgatgaggttttcttaacttaaaagaacatgtatataaacatgcttgcattatatttgtaaatttatgtgatggcaaagaaggagagcataggaaaccacacagacttgggcagggtacagacactcccacttggcatcattcacagcaagtcactggccagtggctggatctgtgaggggctctctcatgatagaaggctatggggatagatgtgtggacacattggacctttcctgaggaagagggactgttcttttgtcccagaaaagcagtggctccattggtgttgacatacatccaacattaaaagccacccccaaatgcccaagaaaaaaagaaagacttatcaacatttgttccatgagcagaaaactggagctctggcctcagtgttacagctaaataatctttaattaaggcaagtcactttcttcttcttaaagctgttttctagtttgagaaatgatgggattttagcagccagtcttgaaggtctctttcagtatcaacattctaagatgctgggacttactgtgtcatcaaatgtgcggttaagattctctgggatattgatactgtttgtgtttttagttgggagatctgagagacctggctttggcaagagcagatgtcattccatatcacctttctcaatgaaagtctcattctatcctctctccaaacccgttttccaacatttgttaatagttacgtctctcctgatgtagcacttaagcttcatttagttattatttctttcttcactttgcacacatttgcatccacatattagggaagaggaatccataagtagctgaaatatctattctgtattattgtgttaacattgagaataagccttggaattagatatggggcaatgactgagccctgtctcacccatggattactccttactgtagggaatggcagtatggtagagggataaatagggggcggggagggatagtcatggatccaagaagtccttagaaatagtggcagggaacaggtgtggaagctcatgcctgtaattataaccttcagctactaagacaggtgtggtggctcacgcctgtgattataatcttcagttactaagacagagtccatgagagtgttaatgggacattttctttagataagatgttttatatgaagaaactgtatcaaagggggaagaaaatgtatttaacaggtgaatcaaatcaggaatcttgtctgagctactggaatgaagttcacaggtcttgaagacca

SEQ ID NO: 95 - DNA, 2803 bp, Homo sapiens
ctcctgccagggttgggtgcgccgctgaacggatggctgagggagccccgcggatcgtttaggaaagccggccagctgatcgtcgtgtgttgccacccattcatgtcaagatgactaagtttggatttttgcgattgtcctatgagaagcaggacacacttttgaagcttctcattctgtcaatggctgctgtattatccttctccactcgtctgtttgctgtcctgagatttgaaagtgttatccatgagtttgatccgtactttaattatcggactaccaggttcctggctgaggaggggttttataaattccataactggtttgatgaccgagcctggtaccctttgggacgaatcattggaggaacaatttacccaggtttaatgatcacctctgctgcaatctaccatgtactccattttttccacatcaccatcgacattcggaatgtctgtgtgttcctggcccctctcttctcctccttcaccaccatcgtcacgtaccaccttaccaaagagctcaaggatgcaggggctgggcttcttgctgctgccatgattgctgtagttcctggatatatctcccgatctgtggctggctcctatgataatgaagggattgccatcttttgcatgctactcacctactacatgtggatcaaggcagtaaagactggttccatctgttgggcagctaagtgtgcccttgcttatttctacatggtctcgtcatggggaggttatgtgttcctgatcaacttaattcctctccacgtcctcgtgctgatgctcacaggccgtttctctcaccggatctatgtggcctactgtactgtttactgcctgggcactatactttctatgcagatctcctttgtgggtttccagcctgtcctttcatcagagcacatggcagcctttggggtctttggtctctgccagatccatgcctttgtggattacctgcgcagcaagttgaatccacaacaatttgaagttcttttccggagcgtcatctctctggtaggctttgtccttctcaccgtgggagctctcctcatgctgacaggaaaaatatctccctggacggggcgtttctactcgctgctggatccctcttatgctaagaacaacatccccatcattgcttctgtgtctgagcatcagcccacaacctggtcctcatactattttgacctgcagctcctcgtcttcatgtttccagttggcctctattactgctttagcaacctgtctgatgcccggatttttatcatcatgtatggtgtgaccagcatgtacttttcagctgtaatggtgcgtctaatgctagtgttggcacctgttatgtgcattctctctggcattggagtctcccaggtgctgtccacatacatgaagaatctggacataagtcgtccagacaagaagagcaagaagcaacaggattccacctaccctattaagaatgaagtggcaagtgggatgatactggtcatggctttctttctcatcacctacacctttcattcaacctgggtgaccagtgaggcctactcttctccgtccattgtactatctgcccgtggtggggatggcagtaggatcatatttgatgacttccgagaagcatattattggcttcgtcataatactccagaggatgcgaaggtcatgtcctggtgggattatggctatcagattacagctatggcaaaccgaacaattttagtggacaataacacatggaataatacccatatttctcgagtagggcaggcaatggcgtccacagaggaaaaagcctatgagatcatgagggagctcgatgtcagctatgtgctggtcatttttggaggcctcactgggtattcctctgatgatatcaacaagtttctttggatggtccggattggagggagcacagatacaggcaaacatatcaaggagaatgactattatactccaactggggagttccgtgtggaccgtgaaggttctccagtgctgctcaactgcctcatgtacaagatgtgttactatcgctttggacaggtttacacagaagccaagcgtcctccaggctttgaccgtgtccgaaatgctgagattgggaataaagactttgagcttgatgtcctggaggaagcatataccacagaacattggctggtcaggatatacaaggtaaaggacctggataatcgaggcttgtcaaggacataaatgtcacgtccagctctgatatgcttcgcactgagcacatcacatttaggacgttgaagatttttttttttttttttttttaatatgcagtttgtaagaacaaaactggatggcatcagaattgtctggaagttttgtcttgggcagtatgggctgggccaaatgaaatgatttttataattctaaacaggttaccaaatgaaatgtcatggctttactttggtcaattaaaggggggaatttttttaaaaaatgtgccttatttgttttgacttataactgatttgagggaggcaaaagctatgctaggctgccagaaggacataagcagaccttgtccattctcttagctccctaaattagccaaatagagacttctttctcaaatcaggaaaactatcaaagaccaattcagatcctacatttacagacagttttgtcataaccctttgcattgcagcacctagtacaattccttggaaacagcgtggctcaataaatttttattgaatgaataaatgtgggaccagaagagtgctagaagagtgcctttctgggctactatgtctctgttc

SEQ ID NO: 96 - DNA, 1855 bp, Homo sapiens
cgcgggagctgggaggctgcgagatccctaccgcagtagccgcctctgccgccgcggagcttcccgaacctcttcagccgcccggagccgctcccggagcccggccgtagaggctgcaatcgcagccgggagcccgcagcccgcgccccgagcccgccgccgcccttcgagggcgccccaggccgcgccatggtgaaggtgacgttcaactccgctctggcccagaaggaggccaagaaggacgagcccaagagcggcgaggaggcgctcatcatcccccccgacgccgtcgcggtggactgcaaggacccagatgatgtggtaccagttggccaaagaagagcctggtgttggtgcatgtgctttggactagcatttatgcttgcaggtgttattctaggaggagcatacttgtacaaatattttgcacttcaaccagatgacgtgtactactgtggaataaagtacatcaaagatgatgtcatcttaaatgagccctctgcagatgccccagctgctctctaccagacaattgaagaaaatattaaaatctttgaagaagaagaagttgaatttatcagtgtgcctgtcccagagtttgcagatagtgatcctgccaacattgttcatgactttaacaagaaacttacagcctatttagatcttaacctggataagtgctatgtgatccctctgaacacttccattgttatgccacccagaaacctactggagttacttattaacatcaaggctggaacctatttgcctcagtcctatctgattcatgagcacatggttattactgatcgcattgaaaacattgatcacctgggtttctttatttatcgactgtgtcatgacaaggaaacttacaaactgcaacgcagagaaactattaaaggtattcagaaacgtgaagccagcaattgtttcgcaattcggcattttgaaaacaaatttgccgtggaaactttaatttgttcttgaacagtcaagaaaaacattattgaggaaaattaatatcacagcataaccccaccctttacattttgtgcagtgattattttttaaagtcttctttcatgtaagtagcaaacagggctttactatcttttcatctcattaattcaattaaaaccattaccttaaaatttttttctttcgaagtgtggtgtcttttatatttgaattagtaactgtatgaagtcatagataatagtacatgtcaccttaggtagtaggaagaattacaatttctttaaatcatttatctggatttttatgttttattagcattttcaagaagacggattatctagagaataatcatatatatgcatacgtaaaaatggaccacagtgacttatttgtagttgttagttgccctgctacctagtttgttagtgcatttgagcacacattttaattttcctctaattaaaatgtgcagtattttcagtgtcaaatatatttaactatttagagaatgatttccacctttatgttttaatatcctaggcatctgctgtaataatattttagaaaatgtttggaatttaagaaataacttgtgttactaatttgtataacccatatctgtgcaatggaatataaatatcacaaagttgtttaactagactgcgtgttgtttttcccgtataataaaaccaaagaatagtttggttcttcaaatcttaagagaatccacataaaagaagaaactattttttaaaaattcacttctatatatacaatgagtaaaatcacagattttttctttaaataaaaataagtcattttaataactaaaccagattctttgtggatactattaaagtaacatttaagcctc

SEQ ID NO: 97 - DNA, 2072 bp, Homo sapiens
agagagagggacgcgagcgggatccaaacttccggtgcctgcagagctcggagcggcggaggcagagaccgaggctgcaccggcagaggctgcggggcggacgcgcgggccggcgcagccatggtgaagattagcttccagcccgccgtggctggcatcaagggcgacaaggctgacaaggcgtcggcgtcggcccctgcgccggcctcggccaccgagatcctgctgacgccggctagggaggagcagcccccacaacatcgatccaagagggggggctcagtgggcggcgtgtgctacctgtcgatgggcatggtcgtgctgctcatgggcctcgtgttcgcctctgtctacatctacagatacttcttccttgcgcagctggcccgagataacttcttccgctgtggtgtgctgtatgaggactccctgtcctcccaggtccggactcagatggagctggaagaggatgtgaaaatctacctcgacgagaactacgagcgcatcaacgtgcctgtgccccagtttggcggcggtgaccctgcagacatcatccatgacttccagcggggtctgactgcgtaccatgatatctccctggacaagtgctatgtcatcgaactcaacaccaccattgtgctgccccctcgcaacttctgggagctcctcatgaacgtgaagagggggacctacctgccgcagacgtacatcatccaggaggagatggtggtcacggagcatgtcagtgacaaggaggccctggggtccttcatctaccacctgtgcaacgggaaagacacctaccggctccggcgccgggcaacgcggaggcggatcaacaagcgtggggccaagaactgcaatgccatccgccacttcgagaacaccttcgtggtggagacgctcatctgcggggtggtgtgaggccctcctcccccagaaccccctgccgtgttcctcttttcttctttccggctgctctctggccctcctccttccccctgcttagcttgtactttggacgcgtttctatagaggtgacatgtctctccattcctctccaaccctgcccacctccctgtaccagagctgtgatctctcggtggggggcccatctctgctgacctgggtgtggcggagggagaggcgatgctgcaaagtgttttctgtgtcccactgtcttgaagctgggcctgccaaagcctgggcccacagctgcaccggcagcccaaggggaaggaccggttgggggagccgggcatgtgaggccctgggcaaggggatggggctgtgggggcggggcggcatgggcttcagaagtatctgcacaattagaaaagtcctcagaagctttttcttggagggtacactttcttcactgtccctattcctagacctggggcttgagctgaggatgggacgatgtgcccagggagggacccaccagagcacaagagaaggtggctacctgggggtgtcccagggactctgtcagtgccttcagcccaccagcaggagcttggagtttggggagtggggatgagtccgtcaagcacaactgttctctgagtggaaccaaagaagcaaggagctaggacccccagtcctgccccccaggagcacaagcagggtcccctcagtcaaggcagtgggatgggcggctgaggaacggggcaggcaaggtcactgctcagtcacgtccacgggggacgagccgtgggttctgctgagtaggtggagctcattgctttctccaagcttggaactgttttgaaagataacacagagggaaagggagagccacctggtacttgtccaccctgcctcctctgttctgaaattccatccccctcagcttaggggaatgcacctttttccctttccttctcacttttgcatgtttttactgatcattcgatatgctaaccgttctcagccctgagccttggagaggagggctgtaacgccttcagtcagtctctggggatgaaactcttaaatgctttgtatattttctcaattagatctcttttcagaagtgtctatagaacaataaaaatcttttacttctg

SEQ ID NO: 98 - DNA, 7395 bp, Homo sapiens
aagcagtttagacaaacactgggcgacggtggctccagcatgtatcagccgaggtggagctgcggggccctggcatgaaaggcatgagccatgagcccaagtccccttcgctagggatgctttccaccgcgaccaggaccaccgccaccgtcaaccccctcaccccctcgccgctcaatggcgccctggtgcccagcggcagccccgccaccagcagcgcgctgtcggcccaggccgcgccatcctccagctttgccgccgcgctgcgcaagctcgccaaacaggcggaggagcccagagggtcctcactgagcagcgagtcgtcccccgtgtcctctccggccaccaaccacagctcccccgccagcacacccaagcgcgtgcccatgggccctatcatcgtcccccctgggggccacagcgtgcccagcaccccccccgtggtgaccatcgctccaaccaaaaccgtgaatggtgtctggaggagtgagagccggcaggatgccggctccaggagcagcagtggaggtcgggaacgcctcattgtggagcccccgctccctcaggagaaggcagggggaccagccatcccctcgcacctgctcagcaccccctaccccttcggcctctcccccagctcagttgtgcaggattcccgcttcccgccactcaacctccagcggcccgtgcaccacgtggtgccccccagtaccgtgaccgaggactacctgagaagcttccggccctaccacaccaccgacgacctccgcatgtcctcactgcctcccctcggcctggacccggccactgctgcagcctactaccaccccagctacctggccccacaccccttcccccacccggccttcaggatggacgactcctactgcctgtctgccctgaggtccccgttctaccccatccccacccccggctccctgcccccactgcacccatcagcgatgcacctgcacctctctggggtccgctaccctcccgagctctcccactcatccctggcagcgctgcactcggagcgcatgtctggcctcagcgcggagaggctgcagatggacgaggagctaaggcgggagagggagcgcgagcgcgagcgcgagcgtgagcgtgaggctgaccgcgagcgggagaaggaacgtgagcgcgaacgcgagaaggagcgcgagcaagagaaggagcgtgagcgtgagaaggagcgcgagcgcgagctggagcgccagcgggagcagcgggcccgggagaaggagctgctggccgccaaggccctggagcccagcttcctgcccgtggccgagctgcatgggctgcgtggccatgccactgaggagcggggcaagccctcggagcagctgaccccaacccgagcagagaagctgaaggatgccggcctgcaggcgcccaagcccgtccaacaccccttgcatccggtgcccaccccacaccacacggtgcccagcctcatctccaaccatggcatcttctctctgcctagcagcagtgctgccacagccctgctgatccagcgcaccaatgaggaggagaagtggctggcgcggcagcggcggctgcggcaggagaaggaggaccggcagtctcaggtgtccgagttccggcagcaggtgctggagcagcacctggatatgggccggcccccggtgccggcggaggcagagcacaggccggagagcaccaccaggccaggaccaaaccgtcacgagccaggtggccgtgaccctccgcagcactttggggggccaccacctctgatttcgcccaagccccagctccatgctgcacccacggccctctggaaccccgtgtccctgatggacaacaccttggagacgcggcgggccgaaagccactctctgcacagccacccggctgcatttgagcccagccgccaggcagccgtgccgctggtgaaggtggagcgggtcttctgcccggagaaagcagaggaggggccacggaagcgtgagcctgcccctctggacaagtaccagccacctccgccgccaccacgagagggagggagcctggagcaccagcccttcctgcccgggcccgggcccttcctggctgagctcgagaagtccacccagaccatcctgggccagcagcgggcctccctcccacaggcggccaccttcggggagctcagcggacccctgaagcctggctcgccctaccggcccccagtgccacgggcccccgaccctgcctacatctatgatgagttcctgcagcagcgccggaggctggtcagcaagctggacctggaggagcgcaggcggcgggaggcccaggagaaagggtactactacgacctcgatgactcttacgacgagagcgatgaggaggaggtcagggcccacctccgttgcgtggccgagcagccgcccctcaaactggacacgtcctctgagaagctagagtttttgcaactttttggcttgaccacccaacagcagaaggaggaattggtggcccagaagcggaggaagcggcggaggatgctgcgagagagaagcccgtcgcccccaacaattcagagcaagcggcagacgccttcaccgagactggcgctgtctacccgctacagccctgatgagatgaacaacagtcccaacttcgaagaaaagaagaagttcctgaccatcttcaacctgacccacatcagcgctgagaagaggaaagacaaagagagacttgttgaaatgctccgtgccatgaagcagaaggcactgtcagcagcagtggccgactccttgacaaactctccgagggacagtcctgccgtctccctgagtgaaccagccacgcagcaagcctctctggatgtggagaagccggttggtgttgctgcttccttgtctgacatcccaaaggccgcggagcctgggaagctggaacaggtccggccccaggagctgtcgagagtccaggagctagctcctgccagcggggagaaggccaggctgagcgaggcccctggaggcaaaaagagtctgagcatgcttcactatatccggggcgctgcacccaaggacattcctgtgccgctgtcccacagcaccaatgggaagagcaagccgtgggagccctttgtggcagaagagtttgcacatcagttccacgagtcagtgctgcagtccacccagaaggccctgcagaagcataaagggagcgtggctgtgctgtctgcagagcagaaccacaaggttgacacgtccgtccactacaacattcctgagctgcagtcctccagccgcgcccctccaccccagcacaatgggcagcaggagccccccactgcaaggaagggccccccaacccaggagttggaccgggactcggaggaggaggaagaggaggatgatgaagatggagaagatgaggaggaagtccccaagcgcaagtggcaagggatcgaggccgtttttgaagcttaccaggaacacatagaagagcaaaatctggagcggcaggtgttacagacacaatgtagacgactggaggcccggcactacagcctcagcctgacggcagagcagctctcccacagcgtggcggagttgaggagccagaaacagaagatggtctcagaaagggagcggctccaggcagaactggaccacttacgaaagtgccttgccttgcctgcaatgcactggcctaggggctacctgaagggatatcccaggtgacggtttcccttgcactaggccgaacctatagtatagaaatattatctattttattaccttgaatatttaatatttttcactgggaggtttgaagcttacaaaatgagaatgtgccatgcatgaagcaaaggattccaggctccagaaaaaatgaatgaactcaccttgacgtcaatgcaattgaatcaccgttgtcattcagcgagcaaccaatgtaggattgcccacagtttttctttttaaaggtggttttcgcccttcctctcccacattatttcttaatctgaacatgaaggctccattagcaacactaaaacttgatcattaacagccccctgtgcatatgagtggatcaaaccggttctgttctttcttgtgttgccatgttactatgcctcaagcccagtttgcttttgccgcagcgatggggccagtctcattcctccccaggagtgaaacttgcttcagctgaaaaggttgggtgcattgtcagtaaaaagggcttatttgtttcattttactttcctgcaaaattttcttcaaagcaacaagtcctaggagcacacaaagcaacccaaaggcttttccctggaaaagctctttcttacctaaagataaaaccaattcacaaactgaaggtagctttttattactccgtggggagcatgtacagagctctgtgtatacacagcttcacacccaccagattgttactacagtgggttgggttttcatacagacgtaaattttgagagaaaagtcaaaggtgcttcagccttgtactgtgtatatatattaaaaaaaaaacaaagttttgtatgtttttattactttaactattgttataaaaagcctgccatttttaatatgtggtttgggggatttttgtttgtttttcctgtttgggggttttgtttgttgttttggttttttttgggcaaaaaaaaaaaaaaaaccttgcttttagtgtttgtactgctgctggtcaggacattaaaatattgaagtgtttttaaaaattaaagaagaagaaaagtaaaagagcttaccactggcgcctatgcgatcacttcatttttagtttgagttgcaccagaagctgccgtagaaagccatgcgctactgcttacctcctccactccccctgcctgcccccagcatctggacaagctaatagcaaatattacccattgctatcaagggaggagggggtagtctgtagaacccatgtgtgacagtcatgtgcacacatgggcgggggcttttaaaaacctttcaggaagtcaatgatttctgtgattgatataattctaaggtgtctgagagcaggtacagaataggaacttcagaggctttgtttaaacgcaaagctttgtaaaagccacaaggtctgagctgaacccctcctttttgaacttactgtgacaagcacaggaacggtcagaaactgggctcatcacaccaaggcaaagcaacgggcgagtcttcctccttgtcctagttactgcctatggaggcagtgtttagatcaagaaggcctctcttgctcccaagggccctcaccagaggccagggctgccagtcactggtctggggggtggaggcctgagctgagggcagggtgcctgacctgtgtgccggctgctcactgctgtgaccagcagccgagcccttggccctagcccttgctgcgcagaacagcttgctggcagctggcatcgtgtcgctttatctgcccccgcacagtttgctttgtacgtctgccaagaatcttccagttattagcaaactcagacgaatgtaccgccagtattatcagcagtcaacaagcaccttcctctccacagaagcagctggaagagaactcgaggggctgtgctgcaggcctcccctcgaaagacactgggaggtcagcatgttccacaggtgttcagagggagtctgctacaaactatcagggcaaaatctcactggatttctccactgaaaacctacttgaggtttctggtctgaaggcttaagagtcacatcttagcacttccgctctcaggcctcctcctccatcacagatgtctggatgcttttggaaatggccttggctaaagtaaaagggaaaagtagatccgataacttaaaaacgtagctcatcccttaccatccaaggggcactcccttggttggattttctatgacagcacaggggacaggtggcacaccatgagaggtctgcccagggtgggagcagtgtcactgtgctagcaatagttggcttctcccctgtcagtggaaaccccacttctgcccggcccttgagcttcttgcccactgtctccccatccttccacctacttgtggcgatctgagtactctactcttgctcaagaagtaatacgacaatcagaatacaaaccagtaaggcaacacgaataaactaagaaaaaggtaagaactgtctcaaaaacgaaagcacaccacccaagacacagtacccagtcatggtttccccatccaactattagtttcatactttgaaaacttactttcagattattctcaaagaacacagtagcacctaaatctgttttcaattgggcttaaaaattgacatgcaatctcttaagttttttgttcagctacttcacactgagtacctcaaatctgctctggagtcgattatgccacctgtgtgtcaggatgcacctgaaagccctcggctcggtccttagaccatcttcctacattacctggaagggagctgccatctgtccctctgcagagggataccttccaatagtaaattatctggttcctcactgaaacaagttatttttgcttcatatagtcagagtcagactgacatgataaaatatcatgttcctaatctgttgtctcagataagtgaccaagacgggactttccacattttagtctacattctaatcttaaaggaataaagcactgaattgggactaacattctgataggttgcacccttaagagtattcagagagcatcaaaaggagcccacaccttcagcagtgaaggattctaacacagggaatctgcagtttgtagcagaatggtattttcctcaagtagctcataatactgccaaatctcaaaagttaagctgaatttcacaccagatcctacccctttccctgagccacatgtttcacacaagtgtagaaaatgccagggatccaccacaagatggagatggtcagcacaaaccgattctgttcctctttaaagtgtatattagccacttagcaatctctatattctttcaagtaaccaagctgttgactttcttactacttgcagtagcctgtccccaacttttccatccagtgcttaacctaaaaaactccttaactctgccttgacctgaggaagaccatgctaactggtgttattttgtatgtaccctgtgcttaattctataacagtaaaccccatacgcaggtgggagggaggaacaccggtgcctcggtcactctgggggcagtttagatgctgtgaaattaaacctgttctaagtgtacttgtttgaattaattgtattgtaatattatttgttgaatgtagtaattaggtatttatgaatatattgctgtaatttctgacaacatccaaaaaataaaatcttcctaaattatgttaa

SEQ ID NO: 99 - DNA, 7261 bp, Homo sapiens
ttccgaaaggacactgatgacattgaaagtcctaaacgcagtatccgagacagtggctacatcgactgctgggattccgagcgcagcgactccctctctcctcctcgccacggcagagatgattccttcgacagcctggattcctttggctctcgctctcggcagacgccttcaccagatgtagtcctcaggggaagcagcgatgggagaggaagcgactctgaatccgacttgcctcatcggaagctgccagatgtgaagaaggatgacatgtctgcacggcggacttcccatggtgagccgaaatcagcagtgccttttaaccagtacctcccgaacaaaagcaatcagacggcctacgtccccgcgcctctgagaaagaagaaagcagagagagaggaataccgcaagagctggagtaccgccacctccccgctgggtggggagaggcccttcagctttcctgaaacgatagaggaagaggggagtgaagtggggtctgctggtgaagacaacccagctggccaaatgaatcctggttggaagccttccgatggtgggtgtgaattacctgacggcagtggtaaggagcacccttcttcagacggggctgtggtggcaccagctcccaagtctgaagaaaaagatgctgctgagatccaaaagcgcaaaaggctagagcaagctggaatcaaggtcatgccagcagcacagcgctttgccagtcaaaaacaattaagtgaagagaaagaagctattcgtgatattgtccttcgcaaagaaaactctttcctgacccaccaacatggcaacgattcagaggcagaaggtgaagttgtgtgtcgactgcctgatcttgagaaggatgactttgctgcaaggagagcaaggatgaaccaaaccaagccaatggtgccattaaatcaactcctctatggcccttatccaaagaaaggggcagagaaatcagatggcagcaaacagctctcaaagggaatctcaaaaaaaagaagtctagaatataaaagaaaccagggccacacagaagaggtgaagttgatagtgacctgtaacatgagggctcaggaaagtgaacctgtggaaggaggactcaggaaggtgccagatcttcacaaggatgacctggcccagcagagaattcagggcagccttgcccctcaccgcgagcccccgagcttcattacgctctccaacataacagaagctgacttggagacgtgggagagactcaaagtgtcagaaaaggcgagggatggagatgttcagcacatctgtgcttctgagccttccccagaaattaaagcagaaactgccattcgtgatgactttgccaaccgcaaagcaagggcctctaagaaagcttccagccccaggcaaaagtttgtgcactttgggccagtgacggagctagatcagcagaaatggaagcggcttagcattggcaaggctgggcctagagaggatgaagaagaagtcatctgtcatggcagcaagattcaaatggactctgtgtctcctgtctcagcggccacttccagcttaaagggccaccaaatatttaatcgacaaaatgactgcagaacaatgaattgtggccgaggtgactattgcagaagggcctcgtggctggctcctgtgccggagtctcaggaagagtgggtctgcagtttgggcgagtgcccgagggggacagaggaagttacatccaaacagctgccacaggatggcaaagaagaaacagaaagcgctccaagagattctgagaggctgtcaaaggcagaaagatcagaggacagcagccagccactggtgtgtcctctggcctctgagtgtgaggcttcagggacagaagagaagttggagaagatgacagctcctgcctggagtggcagtggactgaaaggccagcgaaagttggatgattcacgaaaagatgacatgatggccaggagaactgggatgtcccttagacacactggatccaacccaaaccagttccttccagttccatttgcaaagcaacaggatgtggaagaatcttctaaaggtctacccatgaaagatcagagatacggtccgagaactcctgtgtctgatgacgcagagagcaccagcatgtttgacatgcggtgtgaggaggaggccgcggtgcagccgcacagcagggcccgccaggagcagctgcagctgataaataaccagctgagggaagaggacgacaaatggcaagatgacctggctcgttggaagagtcgtagaagaagtgtttctcaggacttaatcaagaaagaggaagaaaggaaaaaaatggagaagttactggctggagaagatgggacaagtgaacgaaggaaaagcatcaaaacctacagagaaattgttcaagaaaaagagcggagagagagagagctgcatgaagcatataagaacgctcggtcccaggaggaggcagaggggatccttcaacagtacattgagaggttcaccatcagtgaggctgttctcgaacgcttggagatgccaaaaattctggaaagaagccattcaacagagccaaatttatcctccttcctgaatgaccccaatcccatgaaatacctgcggcaacagtcactgcctccacccaaattcactgccactgttgaaaccaccattgctcgtgccagtgttctggataccagcatgtcagcaggcagtgggtctccaagcaaaactgtcactcccaaagcagtgcctatgctgacacccaagccttactcccagcccaaaaattctcaagatgttctgaagacctttaaggtagacgggaaagtcagtgtgaatggagagacggttcatagagaggaggagaaggaaagagagtgtcccacggtggcacctgcccactccttaaccaaatcccagatgtttgaaggtgtggccagagtgcacgggtctccactggagctgaaacaagacaacggtagcatcgagatcaacataaagaagccaaactctgttccccaagagctcgcagcaaccactgagaaaacggaaccgaatagtcaagaggacaagaatgatggtggaaaatcaagaaaagggaatatagaacttgcctcatcagaaccacagcattttacaacaactgtgactcgatgcagcccgaccgtggcctttgtggaatttccctccagcccccagctgaagaatgatgtgtcggaagaaaaagaccagaagaaaccagaaaatgaaatgagtggaaaggtggagttggtgctgtcacaaaaggtggtaaagccaaaatctccagaacccgaagcaacgctgacatttccatttctggacaaaatgcctgaagccaaccaactacatttgccaaatctcaattctcaagtggattctccaagcagtgagaagtcacctgttatgacaccttttaagttctgggcatgggacccagaagaggagcgcaggcgacaggaaaaatggcaacaggaacaggaacgtttgctccaggagagataccagaaggagcaggacaagctgaaagaagagtgggaaaaggcccaaaaggaggtggaagaggaagaacgcagatactatgaggaggagcgtaagataattgaagacactgtggttccatttactgtttcttcaagttccgctgaccagctgtctacctcttcctccatgactgaaggcagtgggacaatgaataagatagacctgggaaactgtcaagatgaaaaacaagacagaagatggaagaaatcattccagggagatgacagtgacttattgctgaagactagggaaagtgatcgactggaggagaagggcagcctaactgaaggggccttggctcattctgggaaccctgtatcaaaaggagtccatgaagaccatcagctggataccgaggctggggccccacactgtggaacaaacccacagcttgctcaggatccatcccagaatcagcagacatcaaatccaacgcacagttcagaagatgtgaagccaaaaaccctcccgctggataaaagcattaaccatcagatcgagtctcccagtgaaaggcggaagaaaagtccccgagagcacttccaggctgggcctttctctccctgttctcccacccctcccggtcagtcaccaaacaggtctataagtggaaagaagctgtgctcttcctgtgggcttcctttgggtaaaggagctgcaatgatcatcgagaccctcaatctctattttcacatccagtgtttcaggtgtggaatttgtaaaggccagcttggagatgcagtgagtgggacggatgttaggattcgaaatggtctcctgaactgtaatgattgctacatgcgatccagaagtgccgggcagcctacaacattgtgacacggctttcaagcttccggatcactcaccatttctttactgagagtgtcccctggcaactgcttaacaaaatcccaagctcaggggcttctcagcatttacctaatttctgaaaggctcttctgaaaggtggtatctgttctttcgtagcacagtgtttatgtttttcctgtttattgttttggttttttttttttttttgcatttgcacagtatacacaaaagaatatggggttgtaatgatcctgaatagctcaaaaaaggttttagcatggtcaaacaggcttatggtttaaaatgtgttattctcttctttgggaattagctaaatgatgcaataaacctgttttgttttagaatgtctaggaattaaacactttatgtttacagaattgagctgcagaaagtgcaagacatgccaatttgagacacacggtcttctaagactgaaggataaatttaatgcatttcagaaactaaacatcacagcaagctctatctctgagctataatttgtttttaatgcaaagacactagtttgataatatatactgtaatcctgaaacatttgtgttacttacctttggaggtagaaattataccaataaattattgcaccgttagtattagattctgtgtaccttggaagttatgtcattaatataggctggttcatcaaataaagcaaaaccttgcaatatcagctagatttacactccgggacgttgcccaaaggtaggaagaaagcagagggaaatatttcagtcatcatttccaaagtcattatcaaaatctgtgaggaagtttaatcttccaaagagtcaatgtcagacatcaggcctctgttgcctgcttctctcgaggcactagattaggagtcttcaataagagacttaacatgaggtatatggaagatgaggcaccgagataagttcatcattaggtgtgagcactgctcacccttgctggcaagttctccttaagggcctgaagcacaggtgtccaaagaaaagcgttaagtccatcttaatagaatctatgtggtatatgatgtggtcagcccctggtctgtgatcagcaagaacctacagcacagattatgccctgcccacttcaatgaatacctactctcctccattctccatcactttttttgctatcaagaactccggaccttgcccatggagaagtttagagaggaactcttgtggagagctggtttattttctgccctgtgcgacgagtttcagctggccaagaaaggagtcaagttattaaaaagcatcacaatgtagatctccaggctggttttttgttttttgttgttaagactggggaaagggggactatttattctgccttaaatcaatggcaaataagtcaagatgacattttgtgaatgtagactatggatacactcctaatagattgatgtagtcataaaagggggtcaagtagatgtttttctgttatgtaagcaataatttttccgtgtcttattgagtatggctagcgattatttattacatgctagatgggttctttgcatgtgggttccatataggtgcagaaatttcctcagccactggagggatttcgaccatatttgtcatttggatgagctgttattagattgaaatctacacatcatttcattaaaaattgtgccttagaaaacgcaaagctgttgcacatggcgataaattatggatgcagtacattgaagagagatgaagtcacttccaagtttccaagacttctcatggaggtgtttgctgttttacaggaaaaaataaaaataaaaaaagaaaaaaagaaaaaattaaaaagaaaaattgttttgaaaatgtacagatcaagtccaatattttgattatccacctgcatgttttattaaatattttgataatgtggatgtttacactttgcatgatattagcagagtaccactagtaatgcacaaacatgtacaatatggtcattcataaccgatttttatagaatactttttacatgtgcaactccatccgttatgtaaggattacatgaatattgcacattcccttctggtttcacaaacccatttatacatatttcttagtgaggctcattgtacatgtattgaagctagaatcgagtcaagaaaaataaagccccattctccaactgcaaaatgtgctttcccataatgaacactagtcaccagcacagaataatctccaacattttctaaattctaattgccaactgtttctatttatatttgatttatatttcatttggagtctgttacatggcagcttaggcagactagatcttgttttttccaatgcagcataatgagtatgatctatttcttttcaaataatctttgagatcccaggaaaaaaaaaatgctctgctccattgagctataatgtaaatgtgtttgtttaaaaaacaggtgaggcaagtgagtgatttattgttcctgaggaagtatatctgattttttttctcatactccaaaagctagtccctactctttaataaaaataatgggtaactttttgtttttcactagcgaacttccatgacatttcctttctatgtagtgtgattaatgcaatacatattatagttatctatacacagtgtaagatttaacaaactgaaatgatccacctcatatgtgagtccgtccaaaagatgttactgctctgggtgggccagtgttctatatcggttatactaactttcatttaaagtatttattctaaaatgcctctgagaaacagtaaaaaataaaaacaacaagttgtctaaaatgcaacagcttttatagtaaatgtacatttataaataaaatactcaaatc

SEQ ID NO: 100 - DNA, 3033 bp, Homo sapiens
agtttcccgaccagagagaacgaacgtgtctgcgggcgcgcggggagcagaggcggtggcgggcggcggcggcaccgggagccgccgagtgaccctcccccgcccctctggccccccaccctcccacccgcccgtggcccgcgcccatggccgcgcgcgctccacacaactcaccggagtccgcgccttgcgccgccgaccagttcgcagctccgcgccacggcagccagtctcacctggcggcaccgcccgcccaccgccccggccacagcccctgcgcccacggcagcactcgaggcgaccgcgacagtggtgggggacgctgctgagtggaagagagcgcagcccggccaccggacctacttactcgccttgctgattgtctatttttgcgtttacaacttttctaagaacttttgtatacaaaggaactttttaaaaaagacgcttccaagttatatttaatccaaagaagaaggatctcggccaatttggggttttgggttttggcttcgtttcttctcttcgttgactttggggttcaggtgccccagctgcttcgggctgccgaggaccttctgggcccccacattaatgaggcagccacctggcgagtctgacatggctgtcagcgacgcgctgctcccatctttctccacgttcgcgtctggcccggcgggaagggagaagacactgcgtcaagcaggtgccccgaataaccgctggcgggaggagctctcccacatgaagcgacttcccccagtgcttcccggccgcccctatgacctggcggcggcgaccgtggccacagacctggagagcggcggagccggtgcggcttgcggcggtagcaacctggcgcccctacctcggagagagaccgaggagttcaacgatctcctggacctggactttattctctccaattcgctgacccatcctccggagtcagtggccgccaccgtgtcctcgtcagcgtcagcctcctcttcgtcgtcgccgtcgagcagcggccctgccagcgcgccctccacctgcagcttcacctatccgatccgggccgggaacgacccgggcgtggcgccgggcggcacgggcggaggcctcctctatggcagggagtccgctccccctccgacggctcccttcaacctggcggacatcaacgacgtgagcccctcgggcggcttcgtggccgagctcctgcggccagaattggacccggtgtacattccgccgcagcagccgcagccgccaggtggcgggctgatgggcaagttcgtgctgaaggcgtcgctgagcgcccctggcagcgagtacggcagcccgtcggtcatcagcgtcagcaaaggcagccctgacggcagccacccggtggtggtggcgccctacaacggcgggccgccgcgcacgtgccccaagatcaagcaggaggcggtctcttcgtgcacccacttgggcgctggaccccctctcagcaatggccaccggccggctgcacacgacttccccctggggcggcagctccccagcaggactaccccgaccctgggtcttgaggaagtgctgagcagcagggactgtcaccctgccctgccgcttcctcccggcttccatccccacccggggcccaattacccatccttcctgcccgatcagatgcagccgcaagtcccgccgctccattaccaaggtcagtcccggggatttgtagctcgggctggggagccctgtgtgtgctggccccacttcgggacacacgggatgatgctcaccccaccttcttcacccctagagctcatgccacccggttcctgcatgccagaggagcccaagccaaagaggggaagacgatcgtggccccggaaaaggaccgccacccacacttgtgattacgcgggctgcggcaaaacctacacaaagagttcccatctcaaggcacacctgcgaacccacacaggtgagaaaccttaccactgtgactgggacggctgtggatggaaattcgcccgctcagatgaactgaccaggcactaccgtaaacacacggggcaccgcccgttccagtgccaaaaatgcgaccgagcattttccaggtcggaccacctcgccttacacatgaagaggcatttttaaatcccagacagtggatatgacccacactgccagaagagaattcagtattttttacttttcacactgtcttcccgatgagggaaggagcccagccagaaagcactacaatcatggtcaagttcccaactgagtcatcttgtgagtggataatcaggaaaaatgaggaatccaaaagacaaaaatcaaagaacagatggggtctgtgactggatcttctatcattccaattctaaatccgacttgaatattcctggacttacaaaatgccaagggggtgactggaagttgtggatatcagggtataaattatatccgtgagttgggggagggaagaccagaattcccttgaattgtgtattgatgcaatataagcataaaagatcaccttgtattctctttaccttctaaaagccattattatgatgttagaagaagaggaagaaattcaggtacagaaaacatgtttaaatagcctaaatgatggtgcttggtgagtcttggttctaaaggtaccaaacaaggaagccaaagttttcaaactgctgcatactttgacaaggaaaatctatatttgtcttccgatcaacatttatgacctaagtcaggtaatatacctggtttacttctttagcatttttatgcagacagtctgttatgcactgtggtttcagatgtgcaataatttgtacaatggtttattcccaagtatgccttaagcagaacaaatgtgtttttctatatagttccttgccttaataaatatgtaatataaatttaagcaaacgtctattttgtatatttgtaaactacaaagtaaaatgaacattttgtggagtttgtattttgcatactcaaggtgagaattaagttttaaataaacctataatattttatctg

SEQ ID NO: 101 - DNA, 1572 bp, Homo sapiens
gggggaggctggcagcggagctttgaatagggaagttttgcaggggttacgtttgcagtcagtccggtgtttgcaaatattgtgtgggctccgcgcgctgcgggctgcgggagggtccggccgggcgtctctgcgagcctggagtttgcatgaaactttcacctgcgctccggggagactttcggctccggctcccaccgcgcgcctcgccgccctcgcgaccgcgggctccgtccaacccggcccgacatggacgtgctccccatgtgcagcatcttccaggagctccagatcgtgcacgagaccggctacttctcggcgctgccgtctctggaggagtactggcaacagacctgcctagagctggaacgttacctccagagcgagccctgctatgtttcagcctcagaaatcaaatttgacagccaggaagatctgtggaccaaaatcattctggctcgggagaaaaaggaggaatccgaactgaagatatcttccagtcctccagaggacactctcatcagcccgagcttttgttacaacttagagaccaacagcctgaactcagatgtcagcagcgaatcctctgacagctccgaggaactttctcccacggccaagtttacctccgaccccattggcgaagttttggtcagctcgggaaaattgagctcctctgtcacctccacgcctccatcttctccggaactgagcagggaaccttctcaactgtggggttgcgtgcccggggagctgccctcgccagggaaggtgcgcagcgggacttcggggaagccaggtgacaagggaaatggcgatgcctcccccgacggcaggaggagggtgcaccggtgccactttaacggctgcaggaaagtttacaccaaaagctcccacttgaaagcacaccagcggacgcacacaggagaaaagccttacagatgctcatgggaagggtgtgagtggcgttttgcaagaagtgatgagttaaccaggcacttccgaaagcacaccggggccaagccttttaaatgctcccactgtgacaggtgtttttccaggtctgaccacctggccctgcacatgaagaggcacctctgagggagcagagaggtggatcctgtaggctaaaaggcttccaggctgagagccggccgtggaaggagggatgcgtgttccagccaaagcatgccgttctgcaccctacccagttgcctccagggcctctccttggaaggtcttttgagggctaaaaaggtcctgtaagaagcggcatagcacccgtggtgcatggtatgtgggtgaccctggactcgccactggtacccgcccttccgagcggcgcctaagcctttgccgtgagcatgcacactgagaatgctaatggttgggttgattgtatgttgaggatctattactgaccgtatgatgaggccaactttttttccttgtggttagcaagactgcaagagatggaaaaaaagtagtttgaatgttttgtgtgtaaggagtataccatgagatgagatgaccaccaatcatttccttggggggagggggtgtctgcacctt

SEQ ID NO: 102 - DNA, 2711 bp, Homo sapiens
gcgcacttccgggtgttgtctggccgccgtagcgcgtcttgggtctcccggctgccgctgctgccgccgccgcctcgggtcgtggagccaggagcgacgtcaccgccatggcaggcatcaaagctttgattagtttgtcctttggaggagcaatcggactgatgtttttgatgcttggatgtgcccttccaatatacaacaaatactggcccctctttgttctatttttttacatcctttcacctattccatactgcatagcaagaagattagtggatgatacagatgctatgagtaacgcttgtaaggaacttgccatctttcttacaacgggcattgtcgtgtcagcttttggactccctattgtatttgccagagcacatctgattgagtggggagcttgtgcacttgttctcacaggaaacacagtcatctttgcaactatactaggctttttcttggtctttggaagcaatgacgacttcagctggcagcagtggtgaaaagaaattactgaactattgtcaaatggacttcctgtcatttgttggccattcacgcacacaggagatggggcagttaatgctgaatggtatagcaagcctcttgggggtattttaggtgctcccttctcacttttattgtaagcatactattttcacagagacttgctgaaggattaaaaggattttctcttttggaaaagcttgactgatttcacacttatctatagtatgctttttgtggtgtcctgctgaatttaaatatttatgtgtttttcctgttaggttgattttttttggaatcaatatgcaatgttaaacacttttttaatgtaatcatttgcattggttaggaattcagaattccgccggctctattactggtcaagtacatcttttctcttaaaattatttagcctccattattacaaaaaattataaaaataagttttcagtcagtcaggatgacatcactcccaatgttatgcagacatacagacggttggcatacgttatagactgtatactcagtgcaaatatagctgcatttatacctcagaggggccaagtgttaatgcccatgccctccgttaagggttgttggttttactggtagacagatgttttgtggattgaaaattattttatggaattgctacagaggagtgcttttcttctcaattgttagaagaatttatgttaaactttaaggtaagggtgtaaaaacatttttgagataaggtttttatttatgtttattattgttagagtgagttgcaatgtgggaagaaatgacattgaaattccagtttttgaatcctgtttctatttataagtgaaatttgtgatctcctatcaacctttcatgttttaccctgttaaaatggacatacatggaaccactactgatgagggacagttgtatgtttgcatcatatatgccagaaaaccttcctctgcttcctccttttgacttatttggtatgttgtatatattacataaaataacttttcaaatatagtttaataacacttagaagtgtttacttacctggaaaataattgctatgccgtacattcagagtgccccctcccctgcaaggccttgccatgattaacaagtaacttgttagtcttacagataattcatgcattaacagtttaagatttagaccatggtaatagtagttcttattctctaaggttatatcatatgtaatttaaaagtatttttaagacaagtttcctgtatacctctgaactgttttgattttgagttcatcatgatagatctgctgtttccttataaaaggcatttgttgtgtgagttaatgcaaagtagccaagtccagctatatagcagcttcagaaacatacctgaccaaaaaattcccagtaaccaggcatgatcaatttatagtggtcgtttacatctaataattatcaggacttttttcaggagtgggttataaaaacattcaagttggtctgacagtattttgttaaggatatttgtttgtatgtttattcagtatacttacataaaaattatttcgccatcagccaaaactcagtaatcatgacagctgtctgttgttttatgaagtttatttctcaagaaaatgggaataaatttgggatttgttcagcttttttactaaagatgcctaaagccacaggttttattgcctaacttaagccatgacttttagatatgagatgacgggaagcaggacgaaatatcggcgtgtggctggagccttcccactggaggctgaaagtggcttgtggtattataatgttcagatttcaagaggaaggtgcaggtacacatgagttagagagctggtgagacagttgggaactctttgtgcttgtgatctactggacttttttttgcaggaagtgcattctctggtccttccctattttctgttctggatgtcagtgcagtgcactgctactgttttatccacttggccacagactttttctaacagctgcgtattatttctatatactaactgcattggcagcattgtgtctttgaccttgtatactagcttgacatagtgctgtctctgatttctaggctagttacttgagatatgaattttccatagaatatgcactgatacaatattaccattcttctatggaaagaaaacttttgatgatgaaacaataaagattttaaatatctatttt

SEQ ID NO: 103 - DNA, 4392 bp, Homo sapiens
actcttgaattaagagaaggggagctggaggtggctcaggtagagtgcgtaggtttgcagaactgggcctgtgtgtgtaaagtgactaaggcaaaggagtggaagtttgagagaagtttaagagaagaaatggacatgattgcctaaatcagccaaacacaggcaacatggccaacgccctggccagcgccacttgcgagcgctgcaagggcggctttgcgcccgctgagaagatcgtgaacagtaatggggagctgtaccatgagcagtgtttcgtgtgcgctcagtgcttccagcagttcccagaaggactcttctatgagtttgaaggaagaaagtactgtgaacatgactttcagatgctctttgccccttgctgtcatcagtgtggtgaattcatcattggccgagttatcaaagccatgaataacagctggcatccggagtgcttccgctgtgacctctgccaggaagttctggcagatatcgggtttgtcaagaatgctgggagacacctgtgtcgcccctgtcataatcgtgagaaagccagaggccttgggaaatacatctgccagaaatgccatgctatcatcgatgagcagcctctgatattcaagaacgacccctaccatccagaccatttcaactgcgccaactgcgggaaggagctgactgccgatgcacgggagctgaaaggggagctatactgcctcccatgccatgataaaatgggggtccccatctgtggtgcttgccgacggcccatcgaagggcgcgtggtgaacgctatgggcaagcagtggcatgtggagcattttgtttgtgccaagtgtgagaaaccctttcttggacatcgccattatgagaggaaaggcctggcatattgtgaaactcactataaccagctatttggtgatgtttgcttccactgcaatcgtgttatagaaggtgatgtggtctctgctcttaataaggcctggtgcgtgaactgctttgcctgttctacctgcaacactaaattaacactcaagaataagtttgtggagtttgacatgaagccagtctgtaagaagtgctatgagaaatttccattggagctgaagaaaagacttaagaaactagctgagaccttaggaaggaaataagttcctttattttttcttttctatgcaagataagagattaccaacattacttgtcttgatctacccatatttaaagctatatctcaaagcagttgagagaagaggacctatatgaatggttttatgtcatttttttaattaaaaaagaaaaattcatataatcgtgtttaaaacacaaatgaagtcagtatttgcctttgttaacccttatccatttgttgacatgtagactgtttacaaaaaaaaaacacatggttaaatgttaaattttaattaaggcccccaaaaattaaatataactttttaaaatgaaaggagtcaccttttacatgactcaggtgaaaaaacagtataaacattaatttactttgtgttcaaaagaaaattccaactgctgttggggaaggacacagaaaagaaaaataaccacccaagaaaaacaaaaacaagaaaaacaaatcttatacaatcttagtatatttatcaaactagtagctagaaagtgaatatgcacattactaagacaaaaaacaagtgtaattcagaactacttgattttttttagttaaatgcaataattattatgcttagttttataacctgctctccttgtgaattcttccttcaaatgattacttaacgcagtagtaatagctagctgtaggatgtcctttaaatttttgtgcaaaaaaaaatttataccaggtatttggaaatatactttacaatattggaaaatgaagtatttttaatgtattacagcaattatgtttctaagcttaatgttaagcatgtagtcttagaataggacatgaaattaaattgtatgtagcttggaatatattgcttcagaaaactgaatgtgtatgtcggtcatattgcctttataaccatgctaatatctatgctttatacatactcaaacttgccttgccttaaaaacatacatactacatacttaaatcaggaattctagccatctcacagaataccaactaaaactaagtgcattgagatctgagattggtaaacccagattcatttaccacagctgtaattaagtttttagaaactattctctttttggggaaatccattgaagttaatttctgttatcttattagaagaaaatgatgttgatatgtgtttcagattttccatttgaaatcttataattaatttgatttatttactgtaagtaggaggtataaatgacactcttaaattggaaggaggggtgttttagtgtctgttttaggtcaaaattagtgattctatttttatcaaaagttttatcctgaagtttcaggaccactcttccttaataaacttgttaatggaaagcgagctttatgaacatttaaaaatgttgctgctgctttgttgcttaaaaagaaagttgccaagagagacttcttagggaaaatatttgggttttttttccaaaaattgctgaaatattgttttgccatttttaaaaagtctcaggttattaccactctgccattaaatatttgtatgcctgcatttttaaaaattctgtgcatgtactttatggagtacattctatttttgttttcagataccctacaaccaattttttttagtaatcttttagaattgaaattatcataaatgatcgagaataatcatcacatagtttaagattgtatatgttgagtagtttaaaacaatctttgcattttacagtaagaatcaaagtcccttcagtgtgcctttgtcagctaatatgtgaccagcaatgacaaccttgggagtatttattaaatattatgctatgaatataggcaacacagaacagggtttgcagtatagcgtcttgatgctaaattctcatatacctctacacgagaaatatggaggagaaaaacaagcatttacatatattcttcgtcactttgaagatgcatggcctgaactcgactgcttgtgtttgtttacatatcaggcatacccaggcatctcctgcagccagaggttccattgctgtctttgctcagtcctcttttaaaatatgaattagtggacaggcacggtgcctcacacctgtaatcccagcactttgggaggtcgaggcaggtggatcacgaggtcaggagatcaagaccatcctggctaccactgaaaccccatctctactacaaaaaaattagccgggcgtggtggcgggcacctgcagtcccagctactcgggaggctgaggcaggagaatggtgggaacccgggaggcagagcttgcagtgagccaagatcacgccactgcactccagcctgggcaacagagcaagactctgtctcaaaaaaaataaataaataaattatgaatgagtattttctagaaattcaacttgctaagcctgtaatacttaagggtagtttatctagatacagtactttcttccctgataagtagtatcattggagcccttaggtataggagaagaggaagaagtttaaaaagtgtaagtgggccgggcgtggtggctcatgcctgtaatcccagcactttgggaggccgaggggggcggatcacgaggtcaggagatccagactatcctggctaacaaggtgaaaccccgtctctactaaaaatacaaaaaaaaacattagccaggcgtggtggcgggcgcttgtagtcccagctactcgggaggctgaggtaggagaatggcttgaacccaggaggcggagcttgcagtgagccgagattgcaccactgcactccagcctgggcgacagagcaagactccgtctcaaaaaaaaaaaaaaagtgtaagtggattaaaagagaaacttggtctagttcataatatttttaatagggctttccctggctgctggaaaacttaggccagtaagcatctctttgtttaaagtcctacaagacaatttgaaataattcattgttcatgccaaaattctaagtactgtttttcttagcaagtgtaacataatcaggaacaatgggtacaagtaaaacattctttggatgatattcaaagccttattagcactgcacctgaataataggtcattttgcctcactcatttgccaaagtagccatttctaagttaaggaagtttttagataggctcatagccttgtatttcgttttagattgtaagctcaatggcagggatactatattggtaattatgttttcatatagcaaccaccacagtatattcttggtgcttaataaatgtttataattgttaacaataa

SEQ ID NO: 104 - DNA, 1624 bp, Homo sapiens
atgaatatgaaagctagtcgtgtcactctaggagaagcgggcgctcgggcgcgctggcccctggggacgccgagggcggctgcgacgcgccgagaggccgcggctctcccacctgtcaccctggcccttctctgcttggatggtgtcttcctctcctcagccgagaatgacttcgtccaccggatccaggaggaactggaccgctttctgctgcagaagcagctgtcaaaggttcttcttttccccccactctccagtcgcctccggtacctgatccatagaacagcagagaattttgatctcttgagcagcttctccgttggggagggctggaagaggaggacggtcatctgtcaccaggacatcagggtacccagttcggatggcctctctggcccctgccgcgctcctgcctcctgccccagcaggtaccacggtcctcggcccatctccaaccaaggagcagctgcggttccccgaggtgcccgggctggccggtggtatcgtggacgcaagcctgaccagcctttgtatgtgccccgggtgctgcgcaggcaggaagaatgggggctgacctctacctcggtgctcaagagagaggccccagctggcagggacccagaagagcctggagatgttggtgctggagaccccaactctgatcagggactccctgtgctgatgactcagggaacagaggacctaaagggcccaggacaaaggtgtgagaatgagccactgctggaccctgttggccctgagcctctggggcctgagagtcagtcagggaagggagacatggtggagatggccacacggtttgggtccaccctgcagctagacctggaaaaggggaaggagagtctgttggagaagaggctggtggcagaggaggaagaggacgaagaggaggtggaagaggatggccccagcagctgctcggaggacgattacagtgagctgctgcaggagatcacagacaacctgacgaagaaggagattcagatagagaagatccatttggacacatcctccttcgtggaggagctgcctggagagaaggaccttgcccacgtggtagagatctatgactttgaaccagcgctcaagacggaggacctgctggcaacgttttctgagttccaagagaaggggttcaggattcagtgggtggatgatactcacgcactcggcatctttccctgcctggcctcagctgcggaagccctgacccgggagttctcggtgctcaagatccggcccctcacacagggaaccaagcagtcaaagctcaaagccttgcagaggccaaaactcctgcgtctggtgaaggagaggccacagacaaatgcgactgtggcccggcggctggtggcccgggccctgggactccaacacaaaaagaaagagcggcctgctgtccggggtccgctgccgccctgaggcctggagacccaactggcctggatctgcgtcccgacgtagctggcgcccccaacaccataagccttcacagacgccagagcagccccgcaccaccctcgagcttcaccatggggtgtggtgggctttagtttagtcccagaaatggagaaaaaataaaaactcacgttgttctaatgtg

SEQ ID NO: 105 - DNA, 315 bp, Homo sapiens
atgtcagacgcagccgtagacaccagctccgaaatcaccaccgaggacttaaaggagaagaaggaagttgtggaagaggcggaaaatggaagagacgcccctgctcacgggaatgctaatgaggaaaatggggagccggaggctgacaacgaggtagatgaagaagaggaagaaggtggggaggaagaaggtgatggtgaggaagaggatggagatgaagatgagggagctgagtcagctacgggcaagcgggcagctgaagatgatgaggataacgatgtcgatacccagaagcagaagaccgacgaggatgac

SEQ ID NO: 106 - DNA, 3810 bp, Homo sapiens
gcggcggccgccttcggggaagggggtgggtccggggaggggtttgccatcctcctctagttaaaagtaagggggaaaagagtaaacgcgcgactccagcgcgcggctacctacgcttggtgcttgctttctccagccatcggagaccagagccgccccctctgctcgagaaaggggctcagcggcggcggaagcggagggggaccaccgtggagagcgcggtcccagcccggccactgcggatccctgaaaccaaaaagctcctgctgcttctgtaccccgcctgtccctcccagctgcgcagggccccttcgtgggatcatcagcccgaagacagggatggagaggcctctgtgctcccacctctgcagctgcctggctatgctggccctcctgtcccccctgagcctggcacagtatgacagctggccccattaccccgagtacttccagcaaccggctcctgagtatcaccagccccaggcccccgccaacgtggccaagattcagctgcgcctggctgggcagaagaggaagcacagcgagggccgggtggaggtgtactatgatggccagtggggcaccgtgtgcgatgacgacttctccatccacgctgcccacgtcgtctgccgggagctgggctacgtggaggccaagtcctggactgccagctcctcctacggcaagggagaagggcccatctggttagacaatctccactgtactggcaacgaggcgacccttgcagcatgcacctccaatggctggggcgtcactgactgcaagcacacggaggatgtcggtgtggtgtgcagcgacaaaaggattcctgggttcaaatttgacaattcgttgatcaaccagatagagaacctgaatatccaggtggaggacattcggattcgagccatcctctcaacctaccgcaagcgcaccccagtgatggagggctacgtggaggtgaaggagggcaagacctggaagcagatctgtgacaagcactggacggccaagaattcccgcgtggtctgcggcatgtttggcttccctggggagaggacatacaataccaaagtgtacaaaatgtttgcctcacggaggaagcagcgctactggccattctccatggactgcaccggcacagaggcccacatctccagctgcaagctgggcccccaggtgtcactggaccccatgaagaatgtcacctgcgagaatgggctaccggccgtggtgagttgtgtgcctgggcaggtcttcagccctgacggaccctcaagattccggaaagcgtacaagccagagcaacccctggtgcgactgagaggcggtgcctacatcggggagggccgcgtggaggtgctcaaaaatggagaatgggggaccgtctgcgacgacaagtgggacctggtgtcggccagtgtggtctgcagagagctgggctttgggagtgccaaagaggcagtcactggctcccgactggggcaagggatcggacccatccacctcaacgagatccagtgcacaggcaatgagaagtccattatagactgcaagttcaatgccgagtctcagggctgcaaccacgaggaggatgctggtgtgagatgcaacacccctgccatgggcttgcagaagaagctgcgcctgaacggcggccgcaatccctacgagggccgagtggaggtgctggtggagagaaacgggtcccttgtgtgggggatggtgtgtggccaaaactggggcatcgtggaggccatggtggtctgccgccagctgggcctgggattcgccagcaacgccttccaggagacctggtattggcacggagatgtcaacagcaacaaagtggtcatgagtggagtgaagtgctcgggaacggagctgtccctggcgcactgccgccacgacggggaggacgtggcctgcccccagggcggagtgcagtacggggccggagttgcctgctcagaaaccgcccctgacctggtcctcaatgcggagatggtgcagcagaccacctacctggaggaccggcccatgttcatgctgcagtgtgccatggaggagaactgcctctcggcctcagccgcgcagaccgaccccaccacgggctaccgccggctcctgcgcttctcctcccagatccacaacaatggccagtccgacttccggcccaagaacggccgccacgcgtggatctggcacgactgtcacaggcactaccacagcatggaggtgttcacccactatgacctgctgaacctcaatggcaccaaggtggcagagggccacaaggccagcttctgcttggaggacacagaatgtgaaggagacatccagaagaattacgagtgtgccaacttcggcgatcagggcatcaccatgggctgctgggacatgtaccgccatgacatcgactgccagtgggttgacatcactgacgtgccccctggagactacctgttccaggttgttattaaccccaacttcgaggttgcagaatccgattactccaacaacatcatgaaatgcaggagccgctatgacggccaccgcatctggatgtacaactgccacataggtggttccttcagcgaagagacggaaaaaaagtttgagcacttcagcgggctcttaaacaaccagctgtccccgcagtaaagaagcctgcgtggtcaactcctgtcttcaggccacaccacatcttccatgggacttccccccaacaactgagtctgaacgaatgccacgtgccctcacccagcccggcccccaccctgtccagacccctacagctgtgtctaagctcaggaggaaagggaccctcccatcattcatggggggctgctacctgacccttggggcctgagaaggccttgcgggggtggggtttgtccacagagctgctggagcagcaccaagagccagtcttgaccgggatgaggcccacagacaggttgtcatcagcttgtcccattcaagccaccgagctcaccacagacacagtggagccgcgctcttctccagtgacacgtggacaaatgcgggctcatcagcccccccagagagggtcaggccgaaccccatttctcctcctcttaggtcattttcagcaaacttgaatatctagacctctcttccaatgaaaccctccagtctattatagtcacatagataatggtgccacgtgttttctgatttggtgagctcagacttggtgcttccctatccacagcccccaccccttgtttttcaagatactattattatattttcacagacttttgaagcacaaatttattggcatttaatattggacatctgggcccttggaagtacaaatctaaggaaaaaccaacccactgtgtaagtgactcatcttcctgttgttccaattctgtgggtttttgattcaacggtgctataaccagggtcctgggtgacagggcgctcactgagcaccatgtgtcatcacagacacttacacatacttgaaacttggaataaaagaaagatttatgaaacgtgtctgtgtttcctttgacccacagcacctgggccctgagcagcaggcttcctatgttcagtggccagaagcagagcttcaggtacattcgtggttttctccggtggacatgggtcctcagatcccctccagcccagtgtggccaccagggcacctccttcaatagactccaaaaggggcagctcctaccatctgggagaagcaatctaaggagatcacaaaaagtaacggaacaggagtcataatctttcttgaactcctgtggtttttactgaaacttg

SEQ ID NO: 107 - DNA, 4442 bp, Homo sapiens
cttgctccggcctcctcgctcctgcctgagttcggggcctggtctgggcttcgtcctggggctgggaagtttctgcgctccccgctgtccagtctgcatctccgcgcctcccgccgggcccccgcggtcccctcccgcccgcttcccccgctgccctccctcgctgccccctaccctctcccggggctcccggccctctactcccttcgggcgcgggcccctcgccccgcccgggcgcgccccccctcccccgggtcctgcggccccggatgcccgggccccgaggggctgctggcggcctggcccctgagatgcgcggggcgggggcggcggggctgctggcgctgctgctgctgctgctgctgctgctgctgggcctgggcggcagggtcgagggggggccggccggcgagcggggcgcaggcgggggcggggcgctggcccgcgagcgcttcaaggtggtctttgcgccggtgatctgcaagcggacctgtctcaagggccagtgtcgggacagttgtcagcagggctccaacatgacgctcatcggagagaacggccacagcacagacacgctcacgggctccggcttccgcgtggtggtgtgccctctcccctgcatgaatggcggccagtgctcctcgcgaaaccagtgcctgtgtcccccggacttcactgggcgcttctgccaggtgcccgcaggaggagccggtgggggtaccggcggctcaggccccggcctgagcaggacaggggccctgtccacaggggcgctgccgcccctggctccggagggcgactctgtggccagcaagcacgccatctacgccgtccaggtgatcgctgaccctcctgggcccggggaggggcctcctgcccagcacgcagccttcctggtgcccctaggcccgggacagatctcagcagaagtgcaggccccgccccccgtggtgaatgtgcgcgtccatcacccgcccgaggcctcagtccaggtgcaccgcattgagagctcgaacgccgagagcgcagccccctcccagcacctgctgccgcaccccaagccctcgcacccccggccgcccacccagaagcccctgggccgctgctttcaggacactctgcccaagcagccgtgtggcagcaaccccctccccggcctcaccaagcaggaagactgctgcggtagcatcggcactgcctggggccagagcaagtgccacaagtgtccccagctgcagtacacaggagtgcagaagccagggcctgtacgtggggaagtgggcgctgactgtccccagggctacaagaggcttaacagcacccactgccaggacatcaacgagtgcgcaatgccgggcgtgtgtcgccatggtgactgcctcaacaaccctggctcctatcgctgtgtctgcccacctggccatagtttaggcccctcccgtacacagtgcattgcagacaaaccggaggagaagagcctgtgtttccgcctggtgagccctgagcaccagtgccagcacccactgaccacccgcctgacccgccagctctgctgctgcagtgtcggcaaggcctggggcgcgcggtgtcagcgctgcccaacagatggcaccgctgcgttcaaggagatctgcccagctgggaagggataccacattctcacctcccaccagacgctcaccattcagggcgagagtgacttttcccttttcctgcaccctgacgggccacccaagccccagcagcttccggagagccctagccaggctccaccacctgaggacacagaggaagagagaggggtgaccacggactcaccggtgagtgaggagaggtcagtgcagcagagccacccaactgccaccacgactcctgcccggccctaccccgagctgatctcccgtccctcgcccccgaccatgcgctggttcctgccggacttgcctccttcccgcagcgccgtagagatcgctcccactcaggtcacagagactgatgagtgccgactgaaccagaacatctgtggccacggagagtgcgtgccgggcccccctgactactcctgccactgcaaccccggctaccggtcacatccccagcaccgctactgcgtggatgtgaacgagtgcgaggcagagccctgtggcccggggaggggcatctgcatgaacaccggcggctcctacaattgccactgcaaccgcggctaccgcctgcacgtgggcgccggggggcgctcgtgcgtggacctgaacgaatgcgccaagccccacctgtgcggcgacggcggcttctgcatcaactttcccggtcactacaagtgcaactgctaccccggctaccggctcaaagcctcccggcctcctgtgtgcgaagacatcgacgagtgccgggacccaagctcttgcccggatggcaaatgcgagaacaagcccgggagcttcaagtgcatcgcctgtcagcctggctaccgcagccaggggggcggggcctgtcgcgacgtgaacgagtgcgccgagggcagcccctgctcgcctggctggtgcgagaacctcccgggctccttccgctgcacctgtgcccagggctacgcgcccgcgcccgacggccgcagttgcttggatgtggacgagtgtgaggctggggacgtgtgtgacaatggcatctgcagcaacacgccaggatctttccagtgtcagtgcctctctggctaccatctgtccagggaccggagccactgcgaggacattgatgagtgtgacttccctgcagcctgcattgggggtgactgcatcaataccaatggctcctacagatgtctttgcccccaggggcatcggctggtgggtggcaggaaatgccaagacatagatgagtgcagccaggacccgagcctgtgccttccccatggggcctgcaagaaccttcagggctcctatgtgtgtgtctgcgatgagggcttcactcccacccaggaccagcacggttgtgaggaggtggagcagccccaccacaagaaggagtgctacctgaacttcgatgacacagtgttctgcgacagcgtattggccaccaacgtgacccagcaggagtgctgctgctctctgggggccggctggggcgaccactgcgaaatctacccctgcccagtctacagctcagccgagttccacagcctctgcccagacggaaagggctacacccaggacaacaacatcgtcaactacggcatcccagcccaccgtgacatcgacgagtgcatgttgttcgggtcggagatttgcaaggagggcaagtgcgtgaacacgcagcctggctacgagtgctactgcaagcagggcttctactacgacgggaacctgctggaatgcgtggacgtggacgagtgcctggacgagtccaactgccggaacggagtgtgtgagaacacgcgcggcggctaccgctgtgcctgcacgccccctgccgagtacagtcccgcgcagcgccagtgcctgagcccggaagagatggacgtggacgagtgccaggacccggcagcctgccgccctggccgctgcgtcaacctgccgggctcctaccgctgcgagtgtcgcccgccctgggtgcccgggccctccggccgcgattgccagctccccgagagcccggccgagcgtgccccggagcggcgcgacgtgtgctggagccagcgcggagaggacggcatgtgcgctggccccctggccgggcctgccctcaccttcgacgactgctgctgccgccagggccgcggctggggcgcccaatgccgaccgtgcccgccgcgcggcgcggggtcccattgcccgacatcgcagagcgagagcaattccttctgggacacaagccccctgctgttggggaagcccccaagagatgaggacagttcagaggaggattcagacgagtgtcgctgcgtgagtggccgctgcgtgccgcggccgggcggcgccgtgtgcgagtgtcccggcggcttccagctcgacgcctcccgcgcccgctgcgtggatatcgacgagtgccgagagctgaaccagcgcgggctgctgtgcaagagcgagcgctgcgtgaacaccagcggctccttccgctgcgtctgcaaagccggcttcgcgcgcagccgcccgcacggggcctgcgttccccagcgccgccgctgacgccgccgacgccgccctcggcccagacctcggtgatcactgagggatttccgcgagctcggcctcacttctgccccgacttgtggctcggacccagggaccttcagggcccgcagaccctcccggcgccttgagacccgaggcgcccctaccggcccccctccccggttagcgggcggttgtaaggtctccggcgggcgctgcctgccttcctcccagagggtgtttcctagaaactgataaatcagatcgtgcctcttt

SEQ ID NO: 108 - DNA, 4072 bp, Homo sapiens
gggcgctcccggagtatcagcaaaagggttcgccccgcccacagtgcccggctccccccgggtatcaaaagaaggatcggctccgcccccgggctccccgggggagttgatagaagggtccttcccaccctttgccgtccccactcctgtgcctacgacccaggagcgtgtcagccaaagcatggagaatcaagagaaggcgagtatcgcgggccacatgttcgacgtagtcgtgatcggaggtggcatttcaggactatctgctgccaaactcttgactgaatatggcgttagtgttttggttttagaagctcgggacagggttggaggaagaacatatactataaggaatgagcatgttgattacgtagatgttggtggagcttatgtgggaccaacccaaaacagaatcttacgcttgtctaaggagctgggcatagagacttacaaagtgaatgtcagtgagcgtctcgttcaatatgtcaaggggaaaacatatccatttcggggcgcctttccaccagtatggaatcccattgcatatttggattacaataatctgtggaggacaatagataacatggggaaggagattccaactgatgcaccctgggaggctcaacatgctgacaaatgggacaaaatgaccatgaaagagctcattgacaaaatctgctggacaaagactgctaggcggtttgcttatctttttgtgaatatcaatgtgacctctgagcctcacgaagtgtctgccctgtggttcttgtggtatgtgaagcagtgcgggggcaccactcggatattctctgtcaccaatggtggccaggaacggaagtttgtaggtggatctggtcaagtgagcgaacggataatggacctcctcggagaccaagtgaagctgaaccatcctgtcactcacgttgaccagtcaagtgacaacatcatcatagagacgctgaaccatgaacattatgagtgcaaatacgtaattaatgcgatccctccgaccttgactgccaagattcacttcagaccagagcttccagcagagagaaaccagttaattcagcggcttccaatgggagctgtcattaagtgcatgatgtattacaaggaggccttctggaagaagaaggattactgtggctgcatgatcattgaagatgaagatgctccaatttcaataaccttggatgacaccaagccagatgggtcactgcctgccatcatgggcttcattcttgcccggaaagctgatcgacttgctaagctacataaggaaataaggaagaagaaaatctgtgagctctatgccaaagtgctgggatcccaagaagctttacatccagtgcattatgaagagaagaactggtgtgaggagcagtactctgggggctgctacacggcctacttccctcctgggatcatgactcaatatggaagggtgattcgtcaacccgtgggcaggattttctttgcgggcacagagactgccacaaagtggagcggctacatggaaggggcagttgaggctggagaacgagcagctagggaggtcttaaatggtctcgggaaggtgaccgagaaagatatctgggtacaagaacctgaatcaaaggacgttccagcggtagaaatcacccacaccttctgggaaaggaacctgccctctgtttctggcctgctgaagatcattggattttccacatcagtaactgccctggggtttgtgctgtacaaatacaagctcctgccacggtcttgaagttctgttcttatgctctctgctcactggttttcaataccaccaagaggaaaatattgacaagtttaaaggctgtgtcattgggccatgtttaagtgtactggatttaactacctttggcttaattccaatcattgttaaagtaaaaacaattcaaagaatcacctaattaatttcagtaagatcaagctccatcttatttgtcagtgtagatcaactcatgttaattgatagaataaagccttgtgatcactttctgaaattcacaaagttaaacgtgatgtgctcatcagaaacaatttctgtgtcctgtttttattcccttcaatgcaaaatacatgatgatttcagaaacaaagcatttgactttctgtctgtggaggtggagtaggtgaaggcccagcctgtaactgtcctttttcttcccttaggcaatggtgaactgtcattacagagcctagaggctcacagcctcctggaggaagcagcctccactttggatcaggaaatagtaaaggaaagcagtgttgggggtagcggcatgcagaccctcagaccagaatggggacatcttgtggtctgctgcctcaggaatctcctgaccacttgtagtccctccgacttctctagacatctagtctcagtgctagcttatttgtatttttcctctttcacttcttatggaggagagtgtttaactgagttagaatgttgaaactgacttgctgtgacttatgtgcagctttccagttgagcagaggaaaatagtggcaggactgtcccccaggaggactccctgcttagctctgtgggagaccaactacgactggcatcttctcttccccctggaaggcagctagacaccaatggatccttgtcagttgtaacattctatttcaacttcaggaaagcagcagttttcttttaatttttcctatgaccataaaattagacatacctctcaacttacatatgtcttcaacatggttacctctgcataaatattagcaaagcatgccaatttctcttaagtactgaaatacatatgataaatttgactgttatttgttgagactatcaaacagaaaagaaattagggctctaatttccttaaagcaagctcacttgctttagttgttaagttttataaaagacatgaaattgagtcattttatatatgaaaactaagttctctatcttaggagtaatgtcggcccacaagggtgcccacctcttgttttccccttttaaaaactcagatttttaaaagccctttccaaaggtttcaactgtaaaatacttctttttacaatgtatcaacatatttttatttaaggggaattaacaattgccagggaaaccagccaacccaagtttattatatcattaaccttatcataaattcaaacctaagttgctggaccctggtgtgaggacataaatcttccaaagttttgcctatcctaagagctgcatttttctactgctctttaccttgcattttagctaatttaggagttttgagaatgtattggatacgctccagtacataaggagttgccgcatattatatcagactgctttgagaaatctcatccctagtctattgcagttgtttctattagcttactgattaactcagtcctgacacaccttttgggaaatgctgatttaaacttcttaactggcaacagttggaacagtaatcagtttgctaacatatttaaagtcttgaatgttgaagaactcatgtgatttacccttttcaactttttggaaaacgatttaatttattctaattagattaaccctattaatctatggattgggtatcaaaatgaatgccagtccagatgtgcctagacacgaaattggagctgaggactctcacgatatgcaagttcatccaacgtgaagataccataagctttttctctgaaccagagaaatgaaagtcagtttaagaggctgatagatcttggccctgttaaggcatccacttcacagttctgaaggctgagtcagccccactccacagttaggccaagaattagattttaaaacttcatctgtctgtcccagttaactgttaaataaggcctcatcctccactgaagagtatggattgaaggattgtgaactatgtttagtgtgattgtgaacttggtgcctaatgttccatgtctgaagtttgccccagtgctacacgttggagtatacctatgtgtgtgctttgccactgaagtaagattttgcctgtatggtactgttttgtttgttaataaagtgcactgccacccccaatgc

SEQ ID NO: 109 - DNA, 2988 bp, Homo sapiens
gggctgagcggtggggcccgggcggggtgcgcgggccccgtcgccgggtctggggccctgagcagtgaaaggaaatactttgacagatttccaagaactttccaggaaaacggggcggggccccgcgagctgaccaatcgcgacgctgaaggtggagccgagcggtcggggagggccaatagcagcgcgtggacccggggctgaagctacccagaggggcagggagtacttgctgcatttgatcctctacaactggtgttgctcccgttatgcggacagaagacagccccagggaacaaatgctaggaaatggcagggtgagaaaactgaggcatggagaggttacaatataacttagatctcccagctggcaagtaatggtttaagccaggagcctacacacttcctcctacttcctctatgggtgctggtgatctgccgactcctagacatccagctttaaggtcctcagtgaagcttctctgcccccaggcctgtccatgtcagagcaccatgggtgtccctttgaaagtatctcctacaggtgccactagaagcgccaggctggggccgcctctgagcgccccgcgggggccatggatggtgaaacagcagaggagcaggggggccctgtgcccccgccagttgcacccggcggacccggcttgggcggtgctccgggggggcggcgggagcccaagaagtacgcagtgaccgacgactaccagttgtccaagcaggtgctgggcctgggtgtgaacggcaaagtgctggagtgcttccatcggcgcactggacagaagtgtgccctgaagctcctgtatgacagccccaaggcccggcaggaggtagaccatcactggcaggcttctggcggcccccatattgtctgcatcctggatgtgtatgagaacatgcaccatggcaagcgctgtctcctcatcatcatggaatgcatggaaggtggtgagttgttcagcaggattcaggagcgtggcgaccaggctttcactgagagagaagctgcagagataatgcgggatattggcactgccatccagtttctgcacagccataacattgcccaccgagatgtcaagcctgaaaacctactctacacatctaaggagaaagacgcagtgcttaagctcaccgattttggctttgctaaggagaccacccaaaatgccctgcagacaccctgctatactccctattatgtggcccctgaggtcctgggtccagagaagtatgacaagtcatgtgacatgtggtccctgggtgtcatcatgtacatcctcctttgtggcttcccacccttctactccaacacgggccaggccatctccccggggatgaagaggaggattcgcctgggccagtacggcttccccaatcctgagtggtcagaagtctctgaggatgccaagcagctgatccgcctcctgttgaagacagaccccacagagaggctgaccatcactcagttcatgaaccacccctggatcaaccaatcgatggtagtgccacagaccccactccacacggcccgagtgctgcaggaggacaaagaccactgggacgaagtcaaggaggagatgaccagtgccttggccactatgcgggtagactacgaccaggtgaagatcaaggacctgaagacctctaacaaccggctcctcaacaagaggagaaaaaagcaggcaggcagctcctctgcctcacagggctgcaacaaccagtagctcatggggccttggaggagcctggcctctcagcctgcataacagactgaaatgtgctcaggccctggccaggagggcccagggtcattcttttaacaaaaggattattttgttgtgttttaatttgtcactcggaacttcaggatggaggaccctgaccctaaacctccttcagatctctggcccaggctcaagccctagagatgggcagggcctaggggctgggagctgcctgctgccatagcagcacctttagctaggttggcccgagtgaggcctctgtgctgtcctgccctggtgcatggccttagctttctaggccactgggagttgtggctgggcttcccatcttccacagagacatctccctgtgggatgggcagatgggcctggccttgagaaaggcattggccattggttgccatggtgaccagggaccacgttgctgcctgtgaatgctgagtgagcgagtaagggaggaggggcgattgagggttcacctctgccttggggaggctgatttctcacacactggctggccctctcattctcactcctccttgggccctgaggctgctggatccggtctgcctgcctccctgtgcagtccagccctgccttgctgcagccccagcccagatggcactcagcgctctcccctgagggagtccctgggcctagccatcccctcactattcccgacccaaagggtgacttttcatctgaacttaaggtgggagatatttttaacttttttccactttggaaaatgtcactgtgacaaaagccagcatactttccctgcacccatctgctcaccagatctcaggcaggaaagcccctctctgttgaagtcaggggctatcttttggtatacttgtgtgaaagtggctggttgggagcagagctaagtggcttcccattaacctgaggtctctttctttactctgggtcagacctgaggttggggaaggcgactgagccatgctcagaatgtctggtcctggcttgggcctgagtagggcagagagggcctttcctggctgatcagagcttaccagccccaccccaccatggtagccttagggtgctgagtgcctgatactgcctgacaagtgcctgacacgcagcctagttccttcctggcccctctctcactggctgggaaaccctagaccatgtcagataggacaacactgctgggttttacatccagatagtaataaacaccatttcatcattt

SEQ ID NO: 110 - DNA, 4289 bp, Homo sapiens
cttgggcgttggaccccgcatcttattagcaaccagggagatttctccattttcctcttgtctacagtgcggctacaaatctgggatttttttattacttctttttttttcgaactacacttgggctcctttttttgtgctcgacttttccaccctttttccctccctcctgtgctgctgctttttgatctcttcgactaaaatttttttatccggagtgtatttaatcggttctgttctgtcctctccaccacccccacccccctccctccggtgtgtgtgccgctgccgctgttgccgccgccgctgctgctgctcgccccgtcgttacaccaacccgaggctctttgtttcccctcttggatctgttgagtttctttgttgaagaagccagcatgggtgcccagttctccaagaccgcagcgaagggagaagccgccgcggagaggcctggggaggcggctgtggcctcgtcgccttccaaagcgaacggacaggagaatggccacgtgaaggtaaacggcgacgcttcgcccgcggccgccgagtcgggcgccaaggaggagctgcaggccaacggcagcgccccggccgccgacaaggaggagcccgcggccgccgggagcggggcggcgtcgccctccgcggccgagaaaggtgagccggccgccgccgctgcccccgaggccggggccagcccggtagagaaggaggcccccgcggaaggcgaggctgccgagcccggctcgcccacggccgcggagggagaggccgcgtcggccgcctcctcgacttcttcgcccaaggccgaggacggggccacgccctcgcccagcaacgagaccccgaaaaaaaaaaagaagcgcttttccttcaagaagtctttcaagctgagcggcttctccttcaagaagaacaagaaggaggctggagaaggcggtgaggctgaggcgcccgctgccgaaggcggcaaggacgaggccgccgggggcgcagctgcggccgccgccgaggcgggcgcggcctccggggagcaggcagcggcgccgggcgaggaggcggcagcgggcgaggagggggcggcgggtggcgacccgcaggaggccaagccccaggaggccgctgtcgcgccagagaagccgcccgccagcgacgagaccaaggccgccgaggagcccagcaaggtggaggagaaaaaggccgaggaggccggggccagcgccgccgcctgcgaggccccctccgccgccgggcccggcgcgcccccggagcaggaggcagcccccgcggaggagcccgcggccgccgcagcctcgtcagcctgcgcagccccctcacaggaggcccagcccgagtgcagtccagaagcccccccagcggaggcggcagagtaaaagagcaagcttttgtgagataatcgaagaacttttctcccccgtttgtttgttggagtggtgccaggtactggttttggagaacttgtctacaaccagggattgattttaaagatgtctttttttattttacttttttttaagcaccaaattttgttgttttttttttttctcccctccccacagatcccatctcaaatcattctgttaaccaccattccaacaggtcgaggagagcttaaacaccttcttcctctgccttgtttctcttttattttttattttttcgcatcagtattaatgtttttgcatactttgcatctttattcaaaagtgtaaactttctttgtcaatctatggacatgcccatatatgaaggagatgggtgggtcaaaaagggatatcaaatgaagtgataggggtcacaatggggaaattgaagtggtgcataacattgccaaaatagtgtgccactagaaatggtgtaaaggctgtcttttttttttttttttaaagaaaagttattaccatgtattttgtgaggcaggtttacaacactacaagtcttgagttaagaaggaaagaggaaaaaagaaaaaacaccaatacccagatttaaaaaaaaaaaaacgatcatagtcttaggagttcatttaaaccataggaacttttcacttatctcatgttagctgtaccagtcagtgattaagtagaactacaagttgtataggctttattgtttattgctggtttatgaccttaataaagtgtaattatgtattaccagcagggtgtttttaactgtgactattgtataaaaacaaatcttgatatccagaagcacatgaagtttgcaactttccaccctgcccatttttgtaaaactgcagtcatcttggaccttttaaaacacaaattttaaactcaaccaagctgtgataagtggaatggttactgtttatactgtggtatgtttttgattacagcagataatgctttcttttccagtcgtctttgagaataaaggaaaaaaaaatcttcagatgcaatggttttgtgtagcatcttgtctatcatgttttgtaaatactggagaagctttgaccaatttgacttagagatggaatgtaactttgcttacaaaaattgctattaaactcctgcttaaggtgttctaattttctgtgagcacactaaaagcgaaaaataaatgtgaataaaatgtacaaatttgttgtgtttttttatgttctaataatactgagacttctaggtcttaggttaatttttaggaagatcttgcatgccatcaggagtaaattttattgtggttcttaatctgaagttttcaagctctgaaattcataatccgcagtgtcagattacgtagaggaagatcttacaacattccatgtcaaatctgttaccatttattggcatttagttttcatttaagaattgaacataattatttttattgtagctatatagcatgtcagattaaatcatttacaacaaaaggggtgtgaacctaagactatttaaatgtcttatgagaaaatttcataaagccattctcttgtcattcaggtccagaaacaaattttaaactgagtgagagtctatagaatccatactgcagatgggtcatgaaatgtgaccaaatgtgtttcaaaaattgatggtgtattacctgctattgtaattgcttagtgcttggctaatttccaaattattgcataatatgttctaccttaagaaaacaggtttatgtaacaaagtaatggtgttgaatggatgatgtcagttcatgggcctttagcatagttttaagcatcatttttttttttttttttgaaagtgtgttagcatcttgttactcaaaggataagacagacaataatacttcactgaatattaataatctttactagtttacctcctctgctctttgccacccgataactggatatcttttccttcaaaggaccctaaactgattgaaatttaagatatgtatcaaaaacattatttcatttaatgcacatctgttttgctgtttttgagcagtgtgcagtttagggttcatgataaatcattgaaccacatgtgtaacaactgaatgccaaatcttaaactcattagaaaaataacaaattaggttttgacacgcattcttaattggaataatggatcaaaaatagtggttcatgaccttaccaaacacccttgctactaataaaatcaaataacacttagaagggtatgtatttttagttagggtttcttgatcttggaggatgtttgaaagttaaaaattgaatttggtaaccaaaggactgatttatgggtctttcctatcttaaccaacgttttcttagttacctagatggccaagtacagtgcctggtatgtagtaagactcagtaaaaaagtggatttttaaaaataactcccaaagtgaatagtcaaaaatcctgttagcaaactgttatatattgctaagtttgttcttttaacagctggaatttattaagatgcattattttgattttattcactgcctaaaacactttgggtggtattgatggagttggtggattttcctccaagtgattaaatgaaatttgacgtatcttttcatccaaagttttgtacatcatgttttctaacggaaaaaaatgttaatatggcttttttgtattactaaaaatagctttgagattaaggaaaaataaataactcttgtacagttcagtattgtctattaaatctgtattggcagtatgtataatggcatttgctgtggttacaaaatacttcctctgggttataataatcatttgatccaattcctattgcttgtaaaataaagttttaccagttgatataatc

SEQ ID NO: 111 - DNA, 2559 bp, Homo sapiens
gcgggccgaggagccgggcgcaatggagcggaagaggtgggagtgcccggcgctcccgcagggctgggagagggaagaagtgcccagaaggtcggggctgtcggccggccacagggatgtcttttactatagcccgagcgggaagaagttccgcagcaagccgcagctggcgcgctacctgggcggctccatggacctgagcaccttcgacttccgcacgggcaagatgctgatgagcaagatgaacaagagccgccagcgcgtgcgctacgactcctccaaccaggtcaagggcaagcccgacctgaacacggcgctgcccgtgcgccagacggcgtccatcttcaagcagccggtgaccaagattaccaaccaccccagcaacaaggtcaagagcgacccgcagaaggcggtggaccagccgcgccagctcttctgggagaagaagctgagcggcctgaacgccttcgacattgctgaggagctggtcaagaccatggacctccccaagggcctgcagggggtgggacctggctgcacggatgagacgctgctgtcggccatcgccagcgccctgcacactagcaccatgcccatcacgggacagctctcggccgccgtggagaagaaccccggcgtatggctcaacaccacgcagcccctgtgcaaagccttcatggtgaccgacgaggacatcaggaagcaggaagagctggtgcagcaggtgcggaagcggctggaggaggcgctgatggccgacatgctggcgcacgtggaggagctggcccgtgacggggaggcgccgctggacaaggcctgcgctgaggacgacgacgaggaagacgaggaggaggaggaggaggagcccgacccggacccggagatggagcacgtctagggcaggtgctgcggggccacgggggctccctggagtcgggtcctggcagtggggactgcctggtgaacacagatgtgcttgggatgacgggtgcctcccaagagcttcccatctccctagaagagcccaagcgtccccgtcccgtggagtcgctaaagccagccctccctgtcctttccagaggccctgccgagagcccgtgctgcctgctggagccgcctgcagacgcggtcctcggccccacgtgaaccaggctcggcggcgaagcccagccttggagacacccaggaggaaggccgtgctcctggctccctcctcggcccgtccccacttcccggggcctcggggcacacagctggggctgcccccacccgaaagaccctccacgctcgtcctctacagagtccggcttcgggaagtgccgggtgctcctgggccctgcctggctccctacgacctttgggctcgaggccagctcctccccatgcccgctgtcccagctccttgagactggagagcagccagcaggtgcccggcagctcggcgccacggcttgctgacagctgggagggtttctcggtctggaggcgtagttttgaaactcacatcacccactgtgcagcgtgaggacgggactctggtctgctgtggggggcatgcaggacggcgccactctctgccctgccatgcggctggtggtgccacagagcctcaccgtgcctgagtggcatgcccaggaggccgctctccttcagtaaatgtaacacagtcgaggcacgtcatcgggcagccttccctgtgtgccaacgccagccttcgcttctgaaaaccaaactccagccgctgccagtcgggacttggtcgcccggcgctgccagaatgctccactgccagccggcccccctgcctcggtttcccttctgtttagtggcgacacaggcacccagctttggggtggtgctgacgctcccaggggtgccaggagccactgggacagggtgaggctcccagacgctcctcgaggtgcccagctctccagggagcttctggcccaaggccgtctgagggatctgctccttaaccccccagtgccttggcgagggcaggttccaagccacagacgcctgccccgagtggactctgcggccagtccctggtgccctcctggccctgctgcccagtgagggctcctacgggtgggttcattggcctgggcccagcgagcccccacctgcattgaccttaggcccatagagagggcctgtcccggtgctgccccagccaggatctggtcgctgccccagggggactgatgggcagagtcgcccctgtggctggactgtgaccatccctgatggggcctgaccgcgggagctgaggaagcgccgctccaccgtctgccctccaaggacccgcatggaggcagtgggctggcagcttcctgctgctccctgtcagagtcaaagcacaaatcctcaggacgggctcaagggccagggcagccgagggaagctccaggtggggaccacgtcttcctgaggttggtgcccactggctgggaccctttgcagtggggtggcctcccctctgtctgcctggtggagggagccgtgggcgtggggacgtgactgaataaagccaccatgggtggatgtgcttgg

SEQ ID NO: 112 - DNA, 3901 bp, Homo sapiens
ctcggctggctaagcctgcgccgggccgcctcgctcgctcccagctctgtcagtggcccgcggggcccgatcgctgcgcccgcggccagggccgaggcaggcctgacccggggccgggcagcccgcgcgactttcggaacatggcaacccgtgtgtgtctcatcccagaaagagaagactttaaccactgtgatgcctgagaatccagtgagtgtgacgtttctccagatacttcatgctgttcacctgtgtcctcgccgcaccactgccgcacacgactcctgaaccatgggggaaaacgaggatgagaagcaggcccaggcggggcaggtttttgagaactttgtccaggcatccacgtgcaaaggtaccctccaggccttcaacattctcacacgacacctggacctagaccctctggaccacagaaacttttattccaagctcaagtccaaggtgaccacctggaaagccaaagccctgtggtacaaattggataagcgtggttcccacaaagagtataagcgagggaagtcgtgcacgaacaccaagtgtctcatagttgggggaggaccctgtggcttgcgcactgccattgaacttgcctacctgggagccaaagtggtcgtggtggagaagagggactccttctcccggaacaacgtgctacacctctggcctttcaccatccatgaccttcgtggcctgggagccaagaagttctatgggaagttctgtgctggctccatcgaccatatcagtattcgccaactacagctcatcctattcaaggtggccctgatgctgggagttgaaatccatgtgaatgtggagttcgtgaaggttctagagcctcctgaagatcaagaaaatcaaaaaattggctggcgggcagaatttctccctacagaccattctctgtcggagtttgagtttgacgtcatcattggtgccgatggccgcaggaacaccctggaagggttcagaagaaaagaattccgtgggaagctggcgattgccatcaccgccaacttcataaacagaaacagcacagcggaagccaaggtggaagagattagtggtgtggctttcatcttcaatcagaaattttttcaggaccttaaagaagaaacaggcatagatcttgagaacattgtttactacaaggactgcacccactattttgtaatgacagccaagaagcagagcctgctcgacaaaggtgtcatcattaacgactacatcgacacagagatgctgctgtgtgcggagaacgtgaaccaagacaacctgctatcctatgcccgggaagctgcagactttgccaccaactaccagctgccatccttagactttgccatgaaccactatgggcagcctgatgtggccatgtttgactttacctgcatgtatgcctcagagaacgcggccctggtgcgggagcggcaggcgcaccagctgctcgtggcccttgtgggtgacagcttgcttgagccattttggcccatgggtacaggctgtgcccgtggcttcctggcagcctttgacacggcatggatggtgaagagctggaaccagggcacccctcccctggagctgctggctgaaagggaaagtctctaccggctgttacctcagacaaccccggagaacatcaacaagaactttgagcagtacacgttggacccagggacacggtacccaaacctcaactcacactgtgtcaggccccatcaggtgaagcatttgtatatcactaaggagctggagcactaccctctcgagagactgggctcggtgaggagatctgtcaacctctccaggaaggagtcagatatccggcccagcaagctcctgacctggtgccagcagcagacagagggctaccagcatgtcaacgtcaccgacctgaccacatcctggcgcagtgggttggccctgtgtgccatcatccaccgcttccggcctgagctcatcaactttgactctttgaatgaagatgatgctgtggagaacaaccagctcgcatttgatgtggccgagcgagagtttgggatccctccagtgaccacgggcaaagagatggcatctgcccaggagcctgacaagctcagcatggtcatgtacctctccaagttctacgagctcttccggggcaccccactgaggcccgtggattcttggcgcaaaaactatggagaaaatgctgacctcagcttggccaaatcatccatttctaataactatctcaacctcacatttccaaggaagaggactccacgggtggatggtcaaaccggagagaatgacatgaacaaacggagacggaagggcttcaccaacctggacgagccttcaaacttttccagccgtagcttgggctccaatcaagagtgtgggagcagtaaggaaggtggaaatcagaacaaagtcaagtccatggcgaatcagctgctggccaagtttgaggagagcactcggaacccctcactcatgaagcaggaacgccgtgtctcagggataggtaagccggtcctgtgctcttcctccggccctcctgttcactcttgctgccccaagccggaggaggccacacccagcccatcacctcctctgaaaaggcagttcccctctgtggtcgtgacggggcacgtgctcagagagctcaagcaagtgtctgctggcagtgagtgcctgagcagaccttggagagccagagccaagtctgacctacagctgggtgggacagaaaatttcgctaccctgccttctacccgcccgagggcgcaggctctttccggggtgctgtggcggctgcagcaagtggaggaaaagattctccagaagagggctcagaacttggccaacagggaatttcacacaaagaacattaaggagaaggcggctcaccttgcctccatgtttggacacggggatttcccgcagaataaactactctctaaaggcctgtctcatactcatcctccatctcctccctctcgccttccgtctcctgatccagctgcttcttcctctccatcaactgttgactctgcttctcctgccagaaaggaaaagaagtcaccttcagggttccattttcatcccagccatttgagaacagtgcatcctcagctgacggtagggaaagtgtccagcggaataggggctgcagctgaagtcctggtcaatctgtacatgaatgatcacagacctaaggcccaggccacctctccagacctggaatctatgcgaaagtcatttccccttaacctgggaggcagcgacacgtgttacttctgtaagaaacgtgtgtacgtgatggaacggctgagcgccgagggccacttcttccaccgggagtgtttccgctgcagcatctgtgccaccaccttgcgcctggccgcctacacctttgactgcgatgaaggcaaattttactgcaagcctcacttcattcactgtaaaaccaatagcaaacaacggaagagacgggcagagttgaagcaacaaagagaggaggaggcaacatggcaagagcaggaagcccctcggagagacactcccaccgaaagttcttgcgcagtggccgccattggcaccctggaaggcagccccccagttcatttcagccttccagtgctacacccacttcttggctgacacacttctgctctaagagtctccctccctttatagaatgtcaaccaaagagtgccctcctcccctctcagcctcctctttagctagcctccccatctcatcacaacgcatgtctgtgacctttggtaatcatttacagtgccacacggaaccctgtattttgcacacagcaaaacaaacaatgtttagctttatttatggtatttgatgctgtaaatggaaataaatattgttcttt

SEQ ID NO: 113 - DNA, 2356 bp, Homo sapiens
acccccgagctgtgctgctcgcggccgccaccgccgggccccggccgtccctggctcccctcctgcctcgagaagggcagggcttctcagaggcttggcgggaaaaagaacggagggagggatcgcgctgagtataaaagccggttttcggggctttatctaactcgctgtagtaattccagcgagaggcagagggagcgagcgggcggccggctagggtggaagagccgggcgagcagagctgcgctgcgggcgtcctgggaagggagatccggagcgaatagggggcttcgcctctggcccagccctcccgctgatcccccagccagcggtccgcaacccttgccgcatccacgaaactttgcccatagcagcgggcgggcactttgcactggaacttacaacacccgagcaaggacgcgactctcccgacgcggggaggctattctgcccatttggggacacttccccgccgctgccaggacccgcttctctgaaaggctctccttgcagctgcttagacgctggatttttttcgggtagtggaaaaccagcagcctcccgcgacgatgcccctcaacgttagcttcaccaacaggaactatgacctcgactacgactcggtgcagccgtatttctactgcgacgaggaggagaacttctaccagcagcagcagcagagcgagctgcagcccccggcgcccagcgaggatatctggaagaaattcgagctgctgcccaccccgcccctgtcccctagccgccgctccgggctctgctcgccctcctacgttgcggtcacacccttctcccttcggggagacaacgacggcggtggcgggagcttctccacggccgaccagctggagatggtgaccgagctgctgggaggagacatggtgaaccagagtttcatctgcgacccggacgacgagaccttcatcaaaaacatcatcatccaggactgtatgtggagcggcttctcggccgccgccaagctcgtctcagagaagctggcctcctaccaggctgcgcgcaaagacagcggcagcccgaaccccgcccgcggccacagcgtctgctccacctccagcttgtacctgcaggatctgagcgccgccgcctcagagtgcatcgacccctcggtggtcttcccctaccctctcaacgacagcagctcgcccaagtcctgcgcctcgcaagactccagcgccttctctccgtcctcggattctctgctctcctcgacggagtcctccccgcagggcagccccgagcccctggtgctccatgaggagacaccgcccaccaccagcagcgactctgaggaggaacaagaagatgaggaagaaatcgatgttgtttctgtggaaaagaggcaggctcctggcaaaaggtcagagtctggatcaccttctgctggaggccacagcaaacctcctcacagcccactggtcctcaagaggtgccacgtctccacacatcagcacaactacgcagcgcctccctccactcggaaggactatcctgctgccaagagggtcaagttggacagtgtcagagtcctgagacagatcagcaacaaccgaaaatgcaccagccccaggtcctcggacaccgaggagaatgtcaagaggcgaacacacaacgtcttggagcgccagaggaggaacgagctaaaacggagcttttttgccctgcgtgaccagatcccggagttggaaaacaatgaaaaggcccccaaggtagttatccttaaaaaagccacagcatacatcctgtccgtccaagcagaggagcaaaagctcatttctgaagaggacttgttgcggaaacgacgagaacagttgaaacacaaacttgaacagctacggaactcttgtgcgtaaggaaaagtaaggaaaacgattccttctaacagaaatgtcctgagcaatcacctatgaacttgtttcaaatgcatgatcaaatgcaacctcacaaccttggctgagtcttgagactgaaagatttagccataatgtaaactgcctcaaattggactttgggcataaaagaacttttttatgcttaccatcttttttttttctttaacagatttgtatttaagaattgtttttaaaaaattttaagatttacacaatgtttctctgtaaatattgccattaaatgtaaataactttaataaaacgtttatagcagttacacagaatttcaatcctagtatatagtacctagtattataggtactataaaccctaattttttttatttaagtacattttgctttttaaagttgatttttttctattgtttttagaaaaaataaaataactggcaaatatatcattgagcc

SEQ ID NO: 114 - DNA, 4288 bp, Homo sapiens
atcaagttctgacccctcccttcaggctcagagccccaaacagccagctccccgcccccctccacacccagcttccctcccccatggcctcggcccctcccgccaaaggaagtgagaaggggctgttgtaagaggaactaaagccgggagtccggtgaacgggcagaagcagggccatgcccaagccacccccaagatccccctgaacctgcacctccatcacgacccattcaggagcctccaggagcccagacaccagccccccaccatgggcagcaaggagcgcttccactggcagagccacaacgtgaagcagagcggcgtggatgacatggtgcttcttccccagatcaccgaagacgccattgccgccaacctccggaagcgcttcatggacgactacatcttcacctacatcggctctgtgctcatctctgtaaaccccttcaagcagatgccctacttcaccgaccgtgagatcgacctctatcagggcgcggcccagtatgagaatcccccgcacatctacgccctcacggacaacatgtaccggaacatgcttatcgactgtgagaaccagtgtgtcatcattagtggagagagtggagctgggaagacagtggcagccaaatatatcatgggctacatctccaaggtgtctggcggaggcgagaaggtccagcacgtcaaagatatcatcctgcagtccaacccgctgctcgaggccttcggcaacgccaagactgtgcgcaacaacaattccagccgctttggcaagtactttgagatccagttcagccgaggtggggagccagatgggggcaagatctccaacttcttgctggagaagtcccgcgtggtcatgcaaaatgaaaatgagaggaacttccacatctactaccagctgctggaaggggcctcccaggagcaaaggcagaacctgggcctcatgacaccggactactattactacctcaaccaatcggacacctaccaggtggacggcacggacgacagaagcgactttggtgagactctgagtgctatgcaggttattgggatcccgcccagcatccagcagctggtcctgcagctcgtggcggggatcttgcacctggggaacatcagtttctgtgaagacgggaattacgcccgagtggagagtgtggacctcctggcctttcccgcctacctgctgggcattgacagcgggcgactgcaggagaagctgaccagccgcaagatggacagccgctggggcgggcgcagcgagtccatcaatgtgaccctcaacgtggagcaggcagcctacacccgtgatgccctggccaaggggctctatgcccgcctcttcgacttcctcgtggaggccatcaaccgtgctatgcagaaaccccaggaagagtacagcatcggtgtgctggacatttacggcttcgagatcttccagaaaaatggcttcgagcagttttgcatcaacttcgtcaatgagaagctgcagcaaatctttatcgaacttaccctgaaggccgagcaggaggagtatgtgcaggaaggcatccgctggactccaatccagtacttcaacaacaaggtcgtctgtgacctcatcgaaaacaagctgagccccccaggcatcatgagcgtcttggacgacgtgtgcgccaccatgcacgccacgggcgggggagcagaccagacactgctgcagaagctgcaggcggctgtggggacccacgagcatttcaacagctggagcgccggcttcgtcatccaccactacgctggcaaggtctcctacgacgtcagcggcttctgcgagaggaaccgagacgttctcttctccgacctcatagagctgatgcagaccagtgagcaggccttcctccggatgctcttccccgagaagctggatggagacaagaaggggcgccccagcaccgccggctccaagatcaagaaacaagccaacgacctggtggccacactgatgaggtgcacaccccactacatccgctgcatcaaacccaacgagaccaagaggccccgagactgggaggagaacagagtcaagcaccaggtggaatacctgggcctgaaggagaacatcagggtgcgcagagccggcttcgcctaccgccgccagttcgccaaattcctgcagaggtatgccattctgacccccgagacgtggccgcggtggcgtggggacgaacgccagggcgtccagcacctgcttcgggcggtcaacatggagcccgaccagtaccagatggggagcaccaaggtctttgtcaagaacccagagtcgcttttcctcctggaggaggtgcgagagcgaaagttcgatggctttgcccgaaccatccagaaggcctggcggcgccacgtggctgtccggaagtacgaggagatgcgggaggaagcttccaacatcctgctgaacaagaaggagcggaggcgcaacagcatcaatcggaacttcgtcggggactacctggggctggaggagcggcccgagctgcgtcagttcctgggcaagagggagcgggtggacttcgccgattcggtcaccaagtacgaccgccgcttcaagcccatcaagcgggacttgatcctgacgcccaagtgtgtgtatgtgattgggcgagagaaagtgaagaagggacctgagaagggccaggtgtgtgaagtcttgaagaagaaagtggacatccaggctctgcggggagtctccctcagcacgcgacaggacgacttcttcatcctccaagaggatgccgccgacagcttcctggagagcgtcttcaagaccgagtttgtcagccttctgtgcaagcgcttcgaggaggcgacgcggaggcccctgcccctcaccttcagcgacacactacagtttcgggtgaagaaggagggctggggcggtggcggcacccgcagcgtcaccttctcccgcggcttcggcgacttggcagtgctcaaggttggcggtcggaccctcacggtcagcgtgggcgatgggctgcccaagagctccaagcctacgcggaagggaatggccaagggaaaacctcggaggtcgtcccaagcccctacccgggcggcccctgcgccccccagaggcatggatcgcaatggggtgcccccctctgccagagggggccccctgcccctggagatcatgtctggagggggcacccacaggcctccccggggccctccgtccacatccctgggagccagcagacgaccccgggcacgtccgccctcagagcacaacacagaattcctcaacgtgcctgaccagggcatggccggcatgcagaggaagcgcagcgtggggcaacggccagtgcctggtgtgggccgacccaagccccagcctcggacacatggtcccaggtgccgggccctataccagtacgtgggccaagatgtggacgagctgagcttcaacgtgaacgaggtcattgagatcctcatggaagatccctcgggctggtggaagggccggcttcacggccaggagggccttttcccaggaaactacgtggagaagatctgagctgggccctgggatactgccttctctttcgcccgcctatctgcctgccggcctggtggggagccaggccctgccaatgagagcctcgtttacctgggctgcaatagcctaaaagtccagtcctttggcctccagtcctgcccaggccctgggtcaccaggtcactgctgcagcccccgcccctgggccctggtcttcctccaacatcacacctgctgcccattctccatttctgtgtgtgtcaaaggggactaacagcagaatctacctcccaactgccatgtgattaagaaatgggtcttgagtcctgtgctgttggcaaagtgccaggcacagttggggaggggggggtccttaacaagcgtgactttgctcattctgtcatcactaaggcaataaacctttgccaggtgaaagcacgagttaacttactaagtgcccaacaaggacgatgttttcacagccctgtgaggtaggagctgtgaaggaccccatcttacaggtggaacaatggaggttcagagaggttcactgacccaagactgcacagagccatgccttgcattcatatgtgaccataaagcttgaatttgtcccagtttgggctgggcgcagtggctcacgcctgtaatcccagcactttgggaggctgaggcgggcagatcacgtgagaccaggagttcaagaccagcctggataacacagcaaaaccctgtttctact

SEQ ID NO: 115 - DNA, 6083 bp, Homo sapiens
tgcgcttcccgcgggcgcgcggagtgaggacggtgacagccacgcgcgcgcgtacgcgcccgatgcagcgcggccccgtgaccctagtcggccgctgagaggcgcgcggagtctgggccgctgccgtctaggggtcccgtcccgaggcgtccccggcatctccggcccgaatcccggagtgccgggtcgcgcctgcaccgaaggtcccggctcctgtgccctccctgcagccgtcagggcccgtcccccaactcccctttccgctcaggcagggtcctcgcggcccatgctggccgctggggacccgcgcagcccagaccgttcccgggccgggcagccggccaccatggtggccctgaggcctgtgcagcaactccaggggggctaaagggctcagagtgcaggccgtggggcgcgagggtcccgggcctgagccccgcgccatggccggggccatcgcttcccgcatgagcttcagctctctcaagaggaagcaacccaagacgttcaccgtgaggatcgtcaccatggacgccgagatggagttcaattgcgagatgaagtggaaagggaaggacctctttgatttggtgtgccggactctggggctccgagaaacctggttctttggactgcagtacacaatcaaggacacagtggcctggctcaaaatggacaagaaggtactggatcatgatgtttcaaaggaagaaccagtcacctttcacttcttggccaaattttatcctgagaatgctgaagaggagctggttcaggagatcacacaacatttattcttcttacaggtaaagaagcagattttagatgaaaagatctactgccctcctgaggcttctgtgctcctggcttcttacgccgtccaggccaagtatggtgactacgaccccagtgttcacaagcggggatttttggcccaagaggaattgcttccaaaaagggtaataaatctgtatcagatgactccggaaatgtgggaggagagaattactgcttggtacgcagagcaccgaggccgagccagggatgaagctgaaatggaatatctgaagatagctcaggacctggagatgtacggtgtgaactactttgcaatccggaataaaaagggcacagagctgctgcttggagtggatgccctggggcttcacatttatgaccctgagaacagactgacccccaagatctccttcccgtggaatgaaatccgaaacatctcgtacagtgacaaggagtttactattaaaccactggataagaaaattgatgtcttcaagtttaactcctcaaagcttcgtgttaataagctgattctccagctatgtatcgggaaccatgatctatttatgaggagaaggaaagccgattctttggaagttcagcagatgaaagcccaggccagggaggagaaggctagaaagcagatggagcggcagcgcctcgctcgagagaagcagatgagggaggaggctgaacgcacgagggatgagttggagaggaggctgctgcagatgaaagaagaagcaacaatggccaacgaagcactgatgcggtctgaggagacagctgacctgttggctgaaaaggcccagatcaccgaggaggaggcaaaacttctggcccagaaggccgcagaggctgagcaggaaatgcagcgcatcaaggccacagcgattcgcacggaggaggagaagcgcctgatggagcagaaggtgctggaagccgaggtgctggcactgaagatggctgaggagtcagagaggagggccaaagaggcagatcagctgaagcaggacctgcaggaagcacgcgaggcggagcgaagagccaagcagaagctcctggagattgccaccaagcccacgtacccgcccatgaacccaattccagcaccgttgcctcctgacataccaagcttcaacctcattggtgacagcctgtctttcgacttcaaagatactgacatgaagcggctttccatggagatagagaaagaaaaagtggaatacatggaaaagagcaagcatctgcaggagcagctcaatgaactcaagacagaaatcgaggccttgaaactgaaagagagggagacagctctggatattctgcacaatgagaactccgacaggggtggcagcagcaagcacaataccattaaaaagcctcaagcccaaggcagaagacctatctgcatttgagccctcaaagtaggttgttcccagctcaccttgcagagcgccaagtcccgagtggccttctttgaagagctctagcaggtgacccagccaccccaggacctgccacttctcctgctaccgggaccgcgggatggaccagatatcaagagagccatccatagggagctggctgggggtttccgtgggagctccagaactttccccagctgagtgaagagcccagcccctcttatgtgcaattgccttgaactacgaccctgtagagatttctctcatggcgttctagttctctgacctgagtctttgttttaagaagtatttgtcttcctttgtctaatgtgggattcctgactcccttcgtccaaggcaccggtgtgtgtgtgtcttgcactccagagctgacctccaccgcccagcctgggaagtcattgtagggagtgagacactgaagccctgagaagccagtgccatcatccccaccccgcccagggttccggaacattcattcccccaccggtgaggacctggcatgcagcgaagcagcccagcccggcggatcccaggccagcacgcctgccggcttctcatcgtcagggagcccgcccagagctcgtgacgagcaagtgctgggtccccgccaggcaccccgaggcggcgctctggctggcagctggtggggaataggcagggcagctgtggctggggagagactttaggcagaagctgtgatgcaggctgactgccagccgaggggctgggtagtgccgtgcgggagctgatggtacagggcactcgctgtccccctccggccaccctagaccagggtccgagaggcaggcaggagccactcatgtcttccccattgcccgacgcccatagacgctccttcctgtgtggggctggggtactccctggtcgtactgcagtcagcacccgtaacccggctatgaccagggatctgtaagccctgtggctccacaggtgctgcttctcactggcccagactctgagctccaccggcccagtctgcacggcccatctgcttcaccttccctcccagccacgtgccagtggccacagcccacttcccaacccactgttgtacccaggcctcactttgctgttgcccttgtccctcttcgggccctgaattttctgttccctgggggccagccagggccctttgtgcccctcccagcacaggcctgatgcaggtgtccactcacaggtggcgctcacctaggctgtcacaggacccacctccatgccaggcaacagagggccacagaaccacccccacggctcactccttggtctggggccaccttcttgccctttctttttttttttttttttttttttccgagatggagtctctctctgtcacccaggtgggagtgtggtggcacaatctcggctcactgcaacctccacctcctgagttcaagcaattctcctgcctcagcctcccaagtagctgggactacaggcatgcaccaccacacttggccaatgttctgtatttttaatagggacggggttttgccatgttagctaggctggtctcaaactcacacctgggattacaggcatgagccactgcacccagccccttcttgccctttcttttctccatggctgatgctgctgtggccagccagggcccttgagatccttccagtttggctgttatgcaaagcaggtgatttgtcttaatcagataaaagatagaggctatgggggcctcaagatttttggagagcagaggtggtctctggcaattccatctggttttgagaaacttagcagctcacagagcacagagatcctgccttcttcctactatcaggctgacctaatggggttgggctgctcggcaactgcttgggtcaccttgccccaaggaaaccagccctgggtgccacccagccacttagggtctacagggtgggactccagacctagagcgtaagtatggatgttgtggccctgtgtcttcctagtgtgacccagccaggagcggaagcttcaggcgtttgtaaagtgaggtctggctctgcctcctccgttttttttttttttctgtttctgtttctgttttttttttgagatggagtctcgctctgtcgcccaggctggagtgcagtgtcacgatctcagctcactgcaacctccgcctcccaggtacaagagattctcctgcctcagcctcccgagtagctgggactacaggcgtgtgccaccatgcctggctaatttttgtatttttagtagagatggggtttcgccatgttagccagactggtctcgaactcctgacctcaggtgatcctcccaccccggcttcccaaagttctgggattataggcgtgagccaccatgcccggtctcttctcagtcttgaagcccatccctggatttccaccaggagttactttcctcctgacctgtaaatttgttctttaacaatggctgcaggtgggagcatatggtggtttataaaaacgctgtcgggctttgtttccttctttagctgccgtgtctacttctgaagtctgggaagtgccaagccacgcggcctcaagggagctggctggtgtttgagctgtggcagaagcacctggggctccagggagcaggctgggaactgcaggaccttgctcagccaggagcacttccccctccttgaggcaggaatactgaggtgcctccccacagatggagaaggtggagaggaggatgggcctcaggagcatctcaagccccagtagcaggagaaagaaagaaagagatgcctggttttcacagactggttcctgtggctgggatgactgcatccttttttttttttttttgagacggagtttttgcctttgtcgcccaggctggagtgcaatggcgtgatctcggctcaccgcaacctccgcctcccggattcaagcaattctcctgcctcagcctcccgagtagctgggattacaggcacgcacctccacgtccggctaattttgtatttttagtggagacggggtttctccatgtcggtcaggctggtctcgaactcccgacctcaggtgatctgcccacctcggcctcccaaagtgctgggattacaggcatgagccaccgcgcttggccagactgcgtcctttttaagcgaacattttagggcctgggagtttgtcaagtaaggaagtctcaagcccaaagagcagcgtcctgaccatggtggtttcattacgagcccttctgctggctctcaggcagaagccccacagcaccgggaccattcatgaggtcactgcccagctcatgatgtccgtgaggctgtccttttggccagtagccgtgtgcagctgtgtggcacagatggcttcgttcatcctgatcaaggccccacctcagccacagcagtccccccaacctgtgttgtccaccctattattcatgtacctgccaggccctgctagatagcaccccgtggcattacataacacttcatgagtggctgtgtcttgtaattttggggacaggtttctctctttccctctcttttttttgtcaaaagcccagagactgacaaccagctgcagtgtctaagtgttcctcactgacagggtggggcctcaccacccctggagggagcagcgttggcagggagacagcctggcccagtgaccctgggcccaagccagcccctccagggctttcagggaagcgccatccattttcaaagatgtcaaacgtcacttcttcctgtagggcccgagtcctgcctcctatcagggccagatcatagaaggctattttctattctggggaacgattataacttaaatgattgttttaataaaaattctaagctgg

SEQ ID NO: 116 - DNA, 1280 bp, Homo sapiens
cgcagctggagcctgcggctgaggctcgggcgcgctcaggcccggatcctggcggcctgggcggccgcaccatggactcgggaaccgaggagtacgagctcaacggcggcctgcctccgggcacacccggctccccggacgcctcgccggcccgctggggctggaggcacgggcccatcaacgtgaaccattacgccagcaagaagagcgcagccgagagcatgctggacatcgcgctgctgatggccaacgcgtcccagctgaaggccgtcgtggaacagggccccagcttcgccttctatgtgcccctggtggtcctcatctccatctcccttgtgctgcagatcggcgtgggggtgctgctcatcttccttgtcaagtacgaccttaacaacccggccaagcacgccaagctggacttcctcaacaacctggccacgggcctggtgttcatcatcgtggtagtcaacatcttcatcacggccttcggggtccagaagcccttgatggacatggcaccccagcagtaggacacccaggaccctggatgttgcctgccctgcaactcagctgcccgaccccaggagtcgccatacctgtgaggtgtccacctccctgcacatggcactacccagactgccagagcccaggctggcctcatctgcaccatgtccccggaccagcccttgctctgactgcggccaagcaccacgcaggaggccactcttgtctctcagcagctgttcccaggaggcagctccctcctggcacatgggggctggccacaatagcccagagggtcagaactggacagctgcagagacctgtgcccagagaagggtctcgacccactcaaggacacacagcaggtccgtggatgggctggatgagtgaccagggccagcctctgtctcaggacattccagaaggacaaggagatgtctctccctctcccaaagcaccagcgtccctgcctcccgtgggccctgtccgggttgccctggtgaccccagcctctgtccacttcctaacccagggaccctgcacagccagaactgcctttggccctacggatggccactggctctggtcttaagtgcctgggcttggtggccatcaagagggagccagtcaggcctgtgagggccgtagaccttgtatataccctgcaccagcagtgaccgggcagagcccaaccccctccacgggggtcccagcacccacttttctaatcatgaatgaacaataaagcccacgctctttgtcaggctccacatgcc

SEQ ID NO: 117 - DNA, 2728 bp, Homo sapiens
ctctgtggcggagacagccaggttggcagctgacgggacagccggggtctattttgttgcgggttttcagcaaatccagggctggtctggaggcgcgaaaacttaaggcatacagaacgatggagtatatggcagaatccaccgaccgcagccctggacacatcttgtgctgtgagtgtggtgttccgataagtccaaatcctgccaatatttgtgtggcctgtttgcgaagtaaagtggacatcagccaaggtattccgaaacaagtctcgatttcgttctgcaaacaatgtcaaaggtattttcaaccaccaggaacttggatacagtgtgctttagaatccagggaacttcttgctttgtgcttgaaaaaaatcaaagcccctctgagtaaggtacggcttgtagatgcaggctttgtttggactgagcctcattctaagagacttaaagttaaactgactattcagaaagaggtgatgaatggtgctatccttcaacaagtgtttgtggtggattatgttgttcagtcccaaatgtgtggagattgccatagagtagaagctaaggatttctggaaggctgtgattcaagtgaggcaaaagactttgcataaaaaaactttctactatctggaacagttaattctgaaatatggaatgcatcagaatacacttcgtatcaaagagattcatgatggtctggatttttattattcctcaaaacaacatgctcagaagatggtcgaatttcttcagtgtacagttccctgtagatacaaagcatcacaaagactgatctctcaagatatccatagtaacacatacaattacaaaagcactttttctgtggaaattgttccaatatgcaaggataatgttgtctgtctgtctccaaaactggcacaaagcctgggaaatatgaaccagatttgtgtgtgtattcgagtaaccagtgccattcacctcattgatccaaacaccctacaagtggcagatattgatgggagcactttctggagtcaccctttcaatagtttatgtcatcccaaacagctagaggagtttattgtgatggaatgcagcatagtccaagatataaaacgtgctgcaggtgctggaatgatatcaaaaaagcataccctcggggaagtctgggtacagaagacatctgaaatgaatacagataaacagtatttttgtcgtactcatttgggacatcttctaaatcccggagacctggtgttagggtttgatttggccaactgtaacttaaatgatgagcatgtcaacaaaatgaactcagatagagttccagatgtggtattaatcaagaagagctatgaccggaccaaacgtcagcgtcgtagaaactggaaattgaaagagcttgcaagagagagagaaaacatggatacagatgatgaaaggcaataccaagattttcttgaagatcttgaagaagatgaggcaattcgaaaaaatgtcaacatttacagagattcagccatccctgtggaaagtgacaccgatgatgaaggagcacctcgaattagtctggctgagatgcttgaagaccttcatatttcccaagatgccactggtgaagaaggtgcatcaatgctgacataatgagatgttgtagactgtttccatacatgggcttaagaagttggacagagttaccttaagtgtctctactatctttgcctccagatttcaagaggagaaatttagttttaaacctgaataaacatgtttgttttcagtgctcactcaaaccactaaaacagatggatagctttgaggttttagataaggaaagattatggagaatgtagttgttattgatttttggcaattttacatttggaattttatcactgtgcttttttatatgaggcactgtagtattttcacatagtatagtactctggatgtaaaagctcaaaaattgtgattccttgaacgttcactaaatcttcaagcaaaaacacatttttacattatttttacgttgattattttagtgaaagaccatatgaagaagcatttttaatattaacttgttacatactttgatccactttacatcatttttatgttgttgaggtagggaaattagggttcagtttatcactggacattcaggaggcaagtcaatcttttttatttccttataaaattaactcttcaaaagccgttaaacagagagttatcttaatttttattgcagtaggaggaaatatatttaaaatatttgtagatttatagcaaatagagactcgttatttaaaggttaaataacaatttgttcttttgttgtttttgccagtttagggcagtagctgcttttgtcataaatatcttcctaccacatcaaaaatgctgcttttaaaatttttgtttataaattgagaaggaattttctctctataagtttctgtcattgaacagatcaccattaaaaagaatattagaatccagcatgaagataatggctaataaaaatgaggtacatactttataaaaccattaatcagatttgaatgaggaatgcttcccacatccttgaaagaaaaactgtggcttacgttttgaagtattctgagaatgaagtattaagatccaatttctataagcaagatcagacttgttaagtatgccgcaagtaagagctaattcattcattccatgtgtgccactaaataaagagattgagcaagtgc

SEQ ID NO: 118 - DNA, 6821 bp, Homo sapiens
aatctcccaaggcctaaggaggcaagaggcctgcaaatcgcctcctgctcagcaaacgggttgctcagcaggcccggggtcctggtccaccccaggtccctggtttgcccacctccgatggcggccttcgctggcagggtgggcgcctctggggagccagctccgtcccggcgcctttagagccccatctcttccacgtccctggccttcctccccttccaggcggctgtccccgccggggtccagatggtgtcggagggccggcggttcgacggcgggcccggggttcagcctcccggcctccctccgtccctgactctcctttcttcggagagggcgcgggggccggggccaaagcgccgctcttggggttctcctggactcggagttgccccaggcgggcgcagctctgccccgcggggtgccagcctcgggcgggcaaggtccgtgagtcaccgcctgtaaccgaacaccaggcctccctgccccctcccccagctccggccgccaggctgcggcgacacctacaagaaaatgaaggggcgcccaggcccgcggcggccccggccgtatcgcgagcaggtcccggcggcccccggctcgcggcgctctttcttccccggccccggggctcggccagccgcaaccgccgccccggcgccagcaggaatccaggccgagcgaccggccccggagcccgaggcggcggagggcccgcggtagctgcgactggcgagcccgagagcgcccggggagggggcgcccggcttggaatttcccggtcccttccggcccagcgaggacaaagcactcctggccgccgccgccgccgccgccgtggcctacgccgcgccgcacaaagggcgagtcgcgacacgctcccatccccctcccagctcacggcggccccggccccgggtggctgcagggaggtgggggaagccctggctgcaccgcccctcgctccccctcccctggggccgcgcgagcgccgcccccgccccgtctgcgcgtcctcccggggaggggttggggggcgcggcgccccacataacactccccctcctgcgctgcgagccaccctctcccctccctcctgcaaacaccaccgcctcccctgccaccgccgccacctcgcccgacgctccacagctcgccgcggccggggggcggtgcgcggaccgtgcgcgccgcgggcgccagatgtgcagtccccgccgccgccagtgaccgagccgcagtccgagcggtatcgggccgcctccctgatgctgcgggggcgaccttgagcgtacagcggcttccctcggtggggaccccgacatcccagcgctgtgcccggtcttgccctctgtagcccggctcgccccgcgcttggacatggaaggggccgccgcgcctgtggcgggggaccgccccgacttggggctgggggcgccgggctctccccgagaggcggtggcgggggcgactgcagccctggagcccaggaagccgcacggggtgaagcggcatcaccacaagcacaacttgaagcaccgctacgagctgcaggagaccctgggcaaaggcacctacggcaaagtcaagcgggccaccgagaggttttctggccgagtggttgctataaaatccattcgtaaggacaaaattaaggatgaacaagacatggttcacatcagacgagagattgagatcatgtcatctctcaaccatcctcatatcatcagtatttatgaagtgtttgagaacaaagataagattgtgatcatcatggaatatgccagcaaaggggagctgtacgattacatcagtgagcggcgacgcctcagtgagagggagacccggcacttcttccggcagatcgtctctgctgtgcactattgtcacaagaacggtgtggtccaccgggacttgaagctggaaaatatactgctcgatgacaactgcaatattaagattgctgactttgggctttccaacctgtaccagaaggataagttcttacaaacgttttgtgggagtccactctatgcatctcctgagattgtcaatgggagaccttaccgagggccagaggtggacagctgggccctgggtgtgttgctttacactcttgtttatggaacaatgcccttcgatggtttcgatcacaaaaacctcattcggcaaatcagcagcggagagtaccgggagccaacacagccctcagatgctcgaggactcatacggtggatgctgatggtgaaccccgatcgccgggccactattgaggacattgccaaccactggtgggtgaactggggctataagagcagcgtgtgtgactgtgatgccctccatgactctgagtccccactcctggctcggatcattgactggcaccaccgttccacagggctgcaggctgacaccgaagccaaaatgaagggcctggccaaacccacgacctctgaggtcatgctagagcggcagcggtcgctgaagaaatccaagaaagagaatgactttgctcagtctggtcaggatgcagtgcctgaaagcccatccaagttgagttctaagaggcccaaggggatcctgaagaagcgaagcaacagcgagcatcgctctcacagcactggcttcattgaaggtgtagttggtcctgccttaccctctactttcaagatggagcaggacttgtgcaggactggcgtgctcctcccaagctcaccagaggcagaggtgccgggaaaactcagccccaagcagtcggccacgatgcccaagaaaggcatcttgaaaaagacccagcagagagaatcaggttactactcttccccagagcgcagtgagtcttcggagctgttggacagtaatgatgtgatgggcagcagcatcccctcccccagccccccggacccagccagggtaacctcccacagcctctcctgccggaggaagggcatcttgaaacacagcagcaaatactcagcgggcaccatggacccagccctggtcagccctgaaatgcccacactggaatccctgtcagagcctggtgtccctgccgagggcctctcccggagctacagccgcccttccagtgtcatcagcgatgacagcgtgctgtccagcgactcttttgacttgctggatttgcaggagaatcgccctgcccgccagcgcatccgcagctgcgtctctgcagaaaacttcctccagatccaggactttgaggggctccagaaccggccccggccccagtacctgaagcggtaccggaaccggctggcagacagcagcttctccctcctcacagacatggatgatgtgactcaggtctacaagcaagcgctggagatctgcagcaagctcaactagcattccagggcgcccaggggcgggcgggggtacgagggaggaaggggagcaagacttgggctcacaggctggttacctctttgctggctgtgacaacagactgaaaaaggattggcactgtctcacttggccaagtttgcagccttgagccaacacctaaaagggagaggtgggctcttctgccagttctgtcaattgtcagtcagaatttgggccctgtttggcatttgctttatggcacctcctagaggaccagctgtccaggggaggtggtattgaccggcactcagtgggtggagaggaagcatatgtggaaggagcatttccttagaagtcatccagatgcttctggaggaggggcaggagacacttgggctgtttgccttgggtgagcccaaagaacttgccccttttctccttgtattagcaagctaggtctggctgcgtggagctggcaagtagatttcagcaacttgagcttgagttgacgatcaattaatagtggctgccagttgtgctggcgtaagtggcccacatcatggggaaggagtgctgtgattgactagtaatggctaccacgggaaagggaaggggaagcagtagcactaatgctatgtagttgtcatctttgatctggctaggccctgggaatcgggtttagtcatcctgtgggatctatgttaactctttcatgccactggtgaggcatttgttaatttgctactcaactttgaggaaagacagggccttggtcagagagagaatgctctgaactctgctaaggacatagagtcagcccatggtgatttagctccttgctgttcacctcctctttcctgatgtctgccttgctctacagcacaacctcttgagggtggacagggagaaagatgatggtgtcagaggtcaaaactattatatatgacagggcacaagatggtctgtgatctttgcacagatgaatggaagttgatgcacaccaacaagaggcaacttgtcactttctttctcaatattaactggaatgctgcctcttgggttctcacctgcatggatgctttgagttggacgtgatactgtccatattctccagaggattacctggctgaaccattggctctgttcaccagtgacagatggtttccccatccactgagtgtagcatcctcagaggtaggcaagtttgcttctagggagttagcatgtagatgggatattgggatgaggaaaggaaaatcaggtagatggtgctttttttcccccaaatctaagtattctatgtcatggttttaaactttgccatgaactcctgggctttgggggaagagaaagttccattcatttaaatgaataaggtgttgaaagagtgcagggggttgggaggaagcatgtaagagagggaacatttccttagatgttacccagatggttctgggggagacagaaaagaggtgcggcaggactcttatcttaaaaagtaaacaaaacaaaacaaaacaaaacaaaaaactagatatgtaatttctaaacacccagatcacaatgacaagatgccactccaaccatgggacaccttcatgatactaggtttgtacttcctggtctctgggatgacttcagattctgctggccaaggcaaattgaactcagttcaagatggccaccactggtagacgtgtagatagaaaagaggactggtcttgggaacatctttggaaaaaccaacaaacaatagttctagggagatgagaaaaaaattcaccttacagtgctaagaaagtgcattagaatggaattgccctttccttaaggagacagtttgggctctccccttgccaccggctctggtgttttggcttatgcgttccttcaggttgagctgagcagtgtgttatgggaagctgctcaatttcctttcattcaattccacctccttcctgaactctaatagaggttaaaagggaaaaaaaaaattctgtagatagcaaattgtgtgtgtgggggggggtgggggtgtgggtgcatggaggacaacctgcaactctgagctccctacttcctgcctcatttcatgcagtcttttctgaacagcctatgctgctgccctgctggccccttgtgcacggcagctggccgtgtccgtagctgtcagtatgacttagatctagctcctacctactggttgatgtgttttttccttttgccaagtgattgagtctgtttagtagtttccatcattctagtctttaagtaaaaatgacactattgaggaaagtcagtctactcccttcttcctccccccaaacacgtgttctcttttgtcaggaaactcagccagtggactgtggcagagaaagtcctccactcagaggcagagactgagttaagtcataggtggccttaggcatctgcattgtttgcaggggttaagttttccttccagtgagggctggagggatgaattagctggtacctgaagccccgcttagctctgacactctgccaacatcctctgattctaggtgtggtgttgactgtcctttcaaggaaaaacttgcaatagagggaaaagccattaaagcagctccctgcttcatcattaagtcctgtcatccctaccagccaatcccagtcaaagaagttatgctttattcacttctgtggaattacaagtgagagacacttttaggacctgatggacaaagcaggagattcactgtcagctttcctggtcctctccttacttctgtgggccttgcaccgtcttagtttacacatctgccaaaggggtagaattacacttctttttacaggtaaatgtcaaggcacaatcagttttcaggaagtgcttcaagaccccaggtgaaatgaaaatgctaagtaccctctgaatggccatgcctgttaccaggtgctgcttcttcagatgatggggagcacttttcagggtgaaattcaggcgagttttgcccaggcctgctgtcttgagtacaaatgtgaatgatcgactgactgcttgttgccaaactggaaatgttctgtagggatttactggcatggtatcattcctagaagaaaaaaagagagaaacttgactgcacattaaaaaaaaaaaaaaatccacattgtgacttttatttaatttctattttttttggtaataaaaagttgacttttttatttgaatttgtcttttttatttattggtctgaaaggcatttcaaaggtattataataatatattggtgtaatttaattggtgcaacatgctttatggctcctgtcaaaattggttttcactcatttgattggtttgagcccagaacagcctacaggggaaaaacaagctggataaccacccaaagtgtttgtattttcgttggaaactgatttttgtttcattttggtttttgtttctgtttttatttttaaattaaataaattgcaatgaactg

SEQ ID NO: 119 - DNA, 3590 bp, Homo sapiens
gattccccgctcgcgactccccaccccccagggctccctaaagagggccacgagctgcgaaagggcgggaaaggcagttggagaagaggtaagcggttactcactccatggctgcagcaaggagaggcggcggcggcctcggctgaagaaagaaggtgggagcggagagcgcaggcgtggtgagcgcggagacgggccgggggcacaaaggggtcgaggctacagagccatggccggggctacgcaggcagaggcggcgacactgtagtgagaagagactgtgatccgaggacagggaatgaggcggccccggggactggggacagatatatactgggtggcggagcacggccctcccggatccttccgcgccccgccctcgcgcggccccaaccgggaggcagccgggtcccctcctcctggggatcaggggatccgagcctttccttcccactcctagggtccgggaccctcctccctctcagctggggatccgacctcttccctctgagccggggatccagccctctccttgtggctccggggtctggtttcctcctcctgactctaagctctggtttctttctctttctgcctctgaggtctgggcctgcttcctcctgtgattttgaggatccagcctcattctcttcccgcagacctgcaccagttcatttctctttccctttccttgcttgcagaatttcctgccagtcacttttcacttcttcatcccccagctgctgactctgagaaaccctcgtgggttagagtccagcatgagtcacagcactctcccaaatacagacctgccaggatggcctcgggcaaataacttaagttctcttacttcatttccctatctgtaaaataagaaaaatcaactcgcctggtgggtttatgagactcaaataagacgatgtctggcaagccttatgcacagagctcaactcatacattcctgttcaactgttttttttttttgagacggagtctctccgtctctgtcgcccaggctggagtgcagtggcgcgatctcggctcactgcaaactccgcctcccaggttcacgccattctcctgcctcagcctcccgagtagctgggactacaggcgcccgccaccacgcccggctaattttttgtatttttagtagagacggggtttcactgtgttagccaggatggtctcaatttcctggcctcgtgatccgcccgcctcggcctcccaaagtgctgggattacaggcgtgagccatcgctcccggcctcagcatattttattaataggaactctggggcccagtctcatttcttccttaccacttgtaagagccgcagacgttggactgtccaacacctgctgtcattcttctgtctccctcatccctctaaagtgtctgtttccagctatcctcatcttccattccaaatgatgggtgcccaggccccatcccctggcagggattcagacatcgaggccccagctgcgtccttttctccatcccttgcccttggcttcctttcaaaccgtccttcagcttccactggataggaactatctcccaaccctgccaaaaatggaagatctccgttttcgtttagtcacagggtagccatcttgccccttctcatgcactgggccctcctccaccagccgaggtggatgtccgtcttttctctgttgcagaaacccaccttgtcccatccacatcaggacatcccagctggagttcaaccttcatcccttctgtggcagttaggagactgaatcaaggtccagagaaggtggaggaatcctgatactgagcgaaatcttcccaaggctgcagacaccgacggatttgctttgggagccagagtagctgccgccaccagagtccggagccatgagcgggtttaattttggaggcactggggcccctacaggcgggttcacgtttggcactgcaaagacggcaacaaccacacctgctacagggttttctttctccacctctggcactggagggtttaattttggggctcccttccaaccagccacaagtaccccttccaccggcctgttctcacttgccacccagactccggccacacagacgacaggcttcacttttggaacagcgactcttgcttcggggggaactggattttctttggggatcggtgcttcaaagctcaacttgagcaacacagctgccaccccagccatggcaaaccccagcggctttgggctgggcagcagcaacctcactaatgccatatcgagcaccgtcacctccagccagggcacagcacccaccggctttgtgtttggcccctccaccacctctgtggctccagctaccacatctggaggcttctcattcactggtggaagcacggcccaaccctccggtttcaacattggctcagcagggaattcagcccagcccacggcacctgccacgttgcccttcactccggccacgccagcagccaccacagcaggtgccacacagccagctgctcccacacccacagccaccatcaccagcactgggcccagcctctttgcgtcaatagcaactgctccaacctcatctgccaccactggactctccctctgtacccctgtgaccacagcgggcgcccccactgctgggacacagggcttcagcttaaaggcacctggagcagcttccggcacctccacaacaacatccaccgctgccaccgccaccgccaccaccaccagcagcagcagcaccaccggctttgccttgaatttaaaaccactggcgccagccgggatccccagcaatacagcagctgccgtgaccgctccacctggccctggcgcagctgcaggggcggctgccagctccgccatgacctacgcgcagctggagagcctgatcaacaaatggagcctggagctagaggaccaggagcggcacttcctccagcaggccacccaggtcaacgcctgggaccgcacgctgatcgagaatggagaaaagatcaccagcctgcaccgcgaggtggagaaggtgaagctggaccagaagaggctggaccaggagctcgacttcatcctgtcccagcagaaggagctggaagacctgctgagcccactggaggagttggtcaaggagcagagcgggaccatctacctgcagcacgcggatgaggagcgtgagaaaacctacaagctggctgagaacatcgatgcacagctcaagcgcatggcccaggatctcaaggacatcatcgagcacctgaacacgtccggggcccccgccgacaccagtgacccactgcagcagatctgcaagatcctcaatgcgcacatggactcactgcagtggatcgaccagaactcggccctgctgcagaggaaggtggaggaggtgaccaaggtgtgcgagggccggcgcaaggagcaggagcgcagcttccggatcacctttgactgagcgacagcagccctggggcccgcaggtccctagggagttcatgaggggaatgcgccctgttgtctgtagtttggggttgtggcaagatacttgtttgtttgtttctttctttcacatgactgcccttgacatg

SEQ ID NO: 120 - DNA, 2385 bp, Homo sapiens
atgggacagtcagggaggtcccggcaccagaagcgcgcccgcgcccaggcgcagctccgcaacctcgaggcctatgccgcgaacccgcactcgttcgtgttcacgcgaggctgcacgggtcgcaacatccggcagctcagcctggacgtgcggcgggtcatggagccgctcactgccagccgtctgcaggttcgtaagaagaactcgctgaaggactgcgtggcagtggctgggcccctcggggtcacacactttctgatcctgagcaaaacagagaccaatgtctactttaagctgatgcgcctcccaggaggccccaccttgaccttccaggtcaagaagtactcgctggtgcgtgatgtggtctcctcactgcgccggcaccgcatgcacgagcagcagtttgcccacccacccctcctggtactcaacagctttggcccccatggtatgcatgtgaagctcatggccaccatgttccagaacctgttcccctccatcaacgtgcacaaggtgaacctgaacaccatcaagcgctgcctcctcatcgactacaaccccgactcccaggagctggacttccgccactatagcatcaaagttgttcctgtgggcgcgagtcgcgggatgaagaagctgctccaggagaagttccccaacatgagccgcctgcaggacatcagcgagctgctggccacgggcgcggggctgtcggagagcgaggcagagcctgacggcgaccacaacatcacagagctgcctcaggctgtcgctggccgtggcaacatgcgggcccagcagagtgcagtgcggctcaccgagatcggcccgcggatgacactgcagctcatcaaggtccaggagggcgtcggggagggcaaagtgatgttccacagttttgtgagcaagacggaggaggagctgcaggccatcctggaagccaaggagaagaagctgcggctgaaggcgcagaggcaggcccagcaggcccagaatgtgcagcgcaagcaggagcagcgggaggcccacagaaagaagagcctggagggcatgaagaaggcacgggtcgggggtagtgatgaagaggcctctgggatcccttcaaggacggcgagcctggagttgggtgaggacgatgatgaacaggaagatgatgacatcgagtatttctgccaggcggtgggcgaggcgcccagtgaggacctgttccccgaggccaagcagaaacggcttgccaagtctccagggcggaagcggaagcggtgggaaatggatcgaggtgccaagtcctgccctgccaacttcttggcagctgccgacgacaaactcagtgggttccagggggacttcctgtggcccatactggtggttgagttcctggtggccgtggccagcaatggcctggccctgtaccgcttcagcatccggaagcagcgcccatggcaccccgccgtggtcttctctgtccagctggcagtcagcgacctgctctgcgccctgacgctgcccccgctggccgcctacctctatccccccaagcactggcgctatggggaggccgcgtgccgcctggagcgcttcctcttcacctgcaacctgctgggcagcgtcatcttcatcacctgcatcagcctcaaccgctacctgggcatcgtgcaccccttcttcgcccgaagccacctgcgacccaagcacgcctgggccgtgagcgctgccggctgggtcctggccgccctgctggccatgcccacactcagcttctcccacctgaagaggccgcagcagggggcgggcaactgcagcgtggccaggcccgaggcctgcatcaagtgtctggggacagcagaccacgggctggcggcctacagagcgtatagcctggtgctggcggggttgggctgcggcctgccgctgctgctcacgctggcagcctacggcgccctcgggcgggccgtgctacgcagcccaggcatgactgtggccgagaagctgcgtgtggcagcgttggtggccagtggtgtggccctctacgccagctcctatgtgccctaccacatcatgcgggtgctcaacgtggatgctcggcggcgctggagcacccgctgcccgagctttgcagacatagcccaggccacagcagccctggagctggggccctacgtgggctaccaggtgatgcggggcctcatgcccctggccttctgtgtccaccctctactctacatggccgcagtgcccagcctgggctgctgctgccgacactgccccggctacagggacagctggaacccagaggacgccaagagcactggccaagccctgcccctcaatgccacagccgcccctaaaccgtcagagccccagtcccgtgagctgagccaatga

SEQ ID NO: 121 - DNA, 3349 bp, Homo sapiens
aaacgccgggagctgcgagtgtccagctgcggagacccgtgataattcgttaactaattcaacaaacgggacccttctgtgtgccagaaaccgcaagcagttgctaacccagtgggacaggcggattggaagagcgggaaggtcctggcccagagcagtgtggtgagcgctgtgctggaagggaatgcgggcagtgggtacttggtagagcactgactgcctccggccagaggacttcccggaggaggtgacccatgagctggagtggtcagaggaaggctggcaaaagggcatcgtggacagaggaacagcctatgtgagtgggagcagagaccttggccaatgccattccttatggccttgtagtggaagcaaggtgatggggaaggaacactgtaggggatagctgtccacggacgctgtctacaagaccctggagtgagataacgtgcctggtactgtgccctgcatgtgtaagatgcccagttgaccttcgcagcaggagcctggatcagggcacttcctgcctcaggtattgctggacagcccagacacttccctctgtgaccatgaaactctgggtgtctgcattgctgatggcctggtttggtgtcctgagctgtgtgcaggccgaattcttcacctctattgggcacatgactgacctgatttatgcagagaaagagctggtgcagtctctgaaagagtacatccttgtggaggaagccaagctttccaagattaagagctgggccaacaaaatggaagccttgactagcaagtcagctgctgatgctgagggctacctggctcaccctgtgaatgcctacaaactggtgaagcggctaaacacagactggcctgcgctggaggaccttgtcctgcaggactcagctgcaggttttatcgccaacctctctgtgcagcggcagttcttccccactgatgaggacgagataggagctgccaaagccctgatgagacttcaggacacatacaggctggacccaggcacaatttccagaggggaacttccaggaaccaagtaccaggcaatgctgagtgtggatgactgctttgggatgggccgctcggcctacaatgaaggggactattatcatacggtgttgtggatggagcaggtgctaaagcagcttgatgccggggaggaggccaccacaaccaagtcacaggtgctggactacctcagctatgctgtcttccagttgggtgatctgcaccgtgccctggagctcacccgccgcctgctctcccttgacccaagccacgaacgagctggagggaatctgcggtactttgagcagttattggaggaagagagagaaaaaacgttaacaaatcagacagaagctgagctagcaaccccagaaggcatctatgagaggcctgtggactacctgcctgagagggatgtttacgagagcctctgtcgtggggagggtgtcaaactgacaccccgtagacagaagaggcttttctgtaggtaccaccatggcaacagggccccacagctgctcattgcccccttcaaagaggaggacgagtgggacagcccgcacatcgtcaggtactacgatgtcatgtctgatgaggaaatcgagaggatcaaggagatcgcaaaacctaaacttgcacgagccaccgttcgtgatcccaagacaggagtcctcactgtcgccagctaccgggtttccaaaagctcctggctagaggaagatgatgaccctgttgtggcccgagtaaatcgtcggatgcagcatatcacagggttaacagtaaagactgcagaattgttacaggttgcaaattatggagtgggaggacagtatgaaccgcacttcgacttctctaggaatgatgagcgagatactttcaagcatttagggacggggaatcgtgtggctactttcttaaactacatgagtgatgtagaagctggtggtgccaccgtcttccctgatctgggggctgcaatttggcctaagaagggtacagctgtgttctggtacaacctcttgcggagcggggaaggtgactaccgaacaagacatgctgcctgccctgtgcttgtgggctgcaagtgggtctccaataagtggttccatgaacgaggacaggagttcttgagaccttgtggatcaacagaagttgactgacatccttttctgtccttccccttcctggtccttcagcccatgtcaacgtgacagacacctttgtatgttcctttgtatgttcctatcaggctgatttttggagaaatgaatgtttgtctggagcagagggagaccatactagggcgactcctgtgtgactgaagtcccagcccttccattcagcctgtgccatccctggccccaaggctaggatcaaagtggctgcagcagagttagctgtctagcgcctagcaaggtgcctttgtacctcaggtgttttaggtgtgagatgtttcagtgaaccaaagttctgataccttgtttacatgtttgtttttatggcatttctatctattgtggctttaccaaaaaataaaatgtccctaccagaagccttaaagagccttacttggagtatttttaagactggaagcttttaccaggttcatcatttcctatgcatcaccttcatgcaggcagagtctggataatgaatgctttagcagcaaaaaagcatcttgggtcttggatttcagacctggtttcaacacttgtgttccctctaagtgtcagtgtccttttctggaaagtagggtaaatagtttctctttgtctcccagagaacatagcacatgtgttcatgattgtaatgctgttataatgtgtacttcatttttaaattttgagataagaattgttcatgatacacagatgtatacttaaaaaaatatgaaggtgagcaggagcacctgtgtcaacaccaagttagaaaagagaacgttttcaagtcagtacctcaggagccccttgggaacccctcctagatcacatctccttcactgcccccagcactttggagataaatcattgtctcatgatgtgtggtactcattcctttgcttgtctttatagttttaccatctatgattagatccctaaataagtagttattctgttttccctgattttgaacttttactaatagaatgagagtaaatatttttgggtatgtggcttcttttgttcaacattgttttaagattcatccgtgttgcttgtgtagctgtaatttgttttaatctttatagtacattcagttttgttaatgcttattgtaggactgtaccataatacaggcagcatgctgctgataaacactggaattgatttca

SEQ ID NO: 122 - DNA, 3654 bp, Homo sapiens
cgaccacccggcctcggccaataagcgccgccctctcgcccccgtgttactgggtagaagaaaacaaaaacaaacagagcgagaagggccagagactctccgaggcggcggcagagacagaagagcggggtcggggccggctgaccaggaacctgggcgagcagcggcgggggcccgagggattctgaaggaagatttccattaggtaatttgtttaatcagtgcaagcgaaattaagggaaaatggatgtagaaaatgagcagatactgaatgtaaaccctgcagggtattttccctaattctccatggtgcttcaatagcatgttattatcataaaaatgaacagttttgtggaatagatgaccaaatatcctgataacttaagtgactctctcttttccggtgatgaagaaaatgctgggactgaggaaataaagaatgaaataaatggaaattggatttcagcatcctccattaacgaagctagaattaatgccaaggcaaaaaggcgactaaggaaaaactcatcccgggactctggcagaggcgattcggtcagcgacagtgggagtgacgcccttagaagtggattaactgtgccaaccagtccaaagggaaggttgctggataggcgatccagatctgggaaaggaaggggactaccaaagaaaggtggtgcaggaggcaaaggtgtctggggtacacctggacaggtgtatgatgtggaggaggtggatgtgaaagatcctaactatgatgatgaccaggagaactgtgtttatgaaactgtagttttgcctttggatgaaagggcatttgagaagactttaacaccaatcatacaggaatattttgagcatggagatactaatgaagttgcggaaatgttaagagatttaaatcttggtgaaatgaaaagtggagtaccagtgttggcagtatccttagcattggaggggaaggctagtcatagagagatgacatctaagcttctttctgacctttgtgggacagtaatgagcacaactgatgtggaaaaatcatttgataaattgttgaaagatctacctgaattagcactggatactcctagagcaccacagttggtgggccagtttattgctagagctgttggagatggaattttatgtaatacctatattgatagttacaaaggaactgtagattgtgtgcaggctagagctgctctggataaggctaccgtgcttctgagtatgtctaaaggtggaaagcgtaaagatagtgtgtggggctctggaggtgggcagcaatctgtcaatcaccttgttaaagagattgatatgctgctgaaagaatatttactctctggagacatatctgaagctgaacattgccttaaggaactggaagtacctcattttcaccatgagcttgtatatgaagctattataatggttttagagtcaactggagaaagtacatttaagatgattttggatttattaaagtccctttggaagtcttctaccattactgtagaccaaatgaaaagaggttatgagagaatttacaatgaaattccggacattaatctggatgtcccacattcatactctgtgctggagcggtttgtagaagaatgttttcaggctggaataatttccaaacaactcagagatctttgtccttcaaggggcagaaagcgttttgtaagcgaaggagatggaggtcgtcttaaaccagagagctactgaatataagaactcttgcagtcttagatgttataaaaatatatatctgaattgtaagagttgttagcacaagttttttttttttttttttttaagcacttgttttgggtacaaggcatttctgacattttataaacctacatttaaggggaatttttaaaggaaatgttttttcttttttttttgtttttcgagggggcaaggagggacagaaaagtaacctcttcttaagtggaatattctaataagctaccttttgtaagtgccatgtttattatctaatcattccaagttttgcattgatgtctgactgccactcctttctttcaaggacagtgttttttgtagtaaaatcactggtttatacaaagctttatttagggggtaaagttaagctgctaaaaccccatgttggctgctgctgttgagatactgtgctttgggagtaaaaaaagaaagttatttctttgtcttaaagaatttttaaaaaattagtcatgagacttattcatctttccagggaacatactgattggtcttaaaagactagacagttaagtaaaaggtggctggaacatctatttttctacaaaactggaaaaatgaacctggttctagaagaatgtacaccaaaataaaacatgtgaagcagtattgattctttattgggagtacatttttttaggtctcttaaactttaatttcacacagtaaattttgaatctcataaggaagcatatttgaacctagtcaatttaatcttagtgttcccttgaaaactttttttccctacaaaattttaagtgaaaaatacaatagtaaattaagattacactggggaaaaaaatgcaggtatcactttactccattgttatctgacctagagcttaattaagttttagaaatatgtaataccttccatcattccatcatccttaaattctgttaccaaataatggctaatgttacaaaaagttatactccagagacccaaagcttgacatttacctaatgtatgagaaaatattaccaattaacaataaagaatgatcatatttttaacctcttttacatagcctaataactcagcaaggcctcaacgtctgtgctaatttaaactgccaaatattgactgcagcaaacaagaattatattcagaatttatgagggtactgttaggagtatactgcttacaggtttagatatagtctgttagaattaaaaccaagtttagtgttcatatttacctcatgggctttatcaagcccatattacctcagcttatatatagttaccatttttaggtttttaattgtttgacacttggatgataaatgcagtcattttattctcaagtgcttaaaattaatgtaattaaaagcttagctgactacagaataggtgagggtttcttaaaaatgagatttaagggctgggcacggtggctcatgcctgtaatcccagcactttgggaggccgaggtgggcggatcacttgaggttgggagttcatgaccagcttgaccaacatgaagaaaccctgtctctattaaaaatacaaaagtagccaggcatggtggcgcatgcgtgtaatcccagctacttgggaggctgaggcaggagaattgcttgaacctgggaggcagaggttgcagtgagtcgagatggtgccattgctctcgtttgggcaacaagagtgaaactcttgtctcaaaaaaaaaaaaaaatgaggtttaagacagttttgtcattactggtgggatctggtcacacaagatagcattaaacgtgacatggcacataaaattggttaaaaaattttgttttttaattacgtaatgtaaaagcccaacaaacactttatgcaagattggaatgtatcttcaaattcagatttaataaacatgtaaagatcctctgt

SEQ ID NO: 123 - DNA, 7676 bp, Homo sapiens
gccggtttgttaccctgccgggtccggcggccgcccgggtccggcgaggcggggcggcccggggtcccgagggccgggtgcctccttacctgcagccgggcggccgggccggggatggcgggcgccggccgagggcgctgcttggctgcggcggggagaccgggcctgggttgcggcgggcggcggcctggccgggggcgctgacagacgcgcggagggcgggggaggccgggaggtgtcacccggcccagcggggtggaagtgcctggaaagtttgttttcggcttggcgcagcctggagccgagcctccagggttacctttcggttctgtctgtagaggaaccgccctgggcttccacctggaacggggtccttggcgcctccgcctgcgagagaagcagaaggtgcaagttcttgctgaaagcacctgatgctcctgggcccccttttccagattcttgatgacagtggtcgggaaaactcgcctttcacggcccggccaaggggcatttgggtgcttttgctgcccgtggctgtgctcagcgttgtgggaagcccctgggaggccgaatgtgcaggatcaccgaggggaaagtgagcttgacagtatgacgccgtgcccatccagtccagcgtggtgttatgttcctgcccatccccatcaatggtgaggacccagactgagtccagcacgccccctggcattcctggtggcagcaggcagggccccgccatggacggcactgcagccgagcctcggcccggcgccggctccctgcagcatgcccagcctccgccgcagcctcggaagaagcggcctgaggacttcaagtttgggaaaatccttggggaaggctctttttccacggttgtcctggctcgagaactggcaacctccagagaatatgcgattaaaattctggagaagcgacatatcataaaagagaacaaggtcccctatgtaaccagagagcgggatgtcatgtcgcgcctggatcaccccttctttgttaagctttacttcacatttcaggacgacgagaagctgtatttcggccttagttatgccaaaaatggagaactacttaaatatattcgcaaaatcggttcattcgatgagacctgtacccgattttacacggctgagattgtgtctgctttagagtacttgcacggcaagggcatcattcacagggaccttaaaccggaaaacattttgttaaatgaagatatgcacatccagatcacagattttggaacagcaaaagtcttatccccagagagcaaacaagccagggccaactcattcgtgggaacagcgcagtacgtttctccagagctgctcacggagaagtccgcctgtaagagttcagacctttgggctcttggatgcataatataccagcttgtggcaggactcccaccattccgagctggaaacgagtatcttatatttcagaagatcattaagttggaatatgactttccagaaaaattcttccctaaggcaagagacctcgtggagaaacttttggttttagatgccacaaagcggttaggctgtgaggaaatggaaggatacggacctcttaaagcacacccgttcttcgagtccgtcacgtgggagaacctgcaccagcagacgcctccgaagctcaccgcttacctgccggctatgtcggaagacgacgaggactgctatggcaattatgacaatctcctgagccagtttggctgcatgcaggtgtcttcgtcctcctcctcacactccctgtcagcctccgacacgggcctgccccagaggtcaggcagcaacatagagcagtacattcacgatctggactcgaactcctttgaactggacttacagttttccgaagatgagaagaggttgttgttggagaagcaggctggcggaaacccttggcaccagtttgtagaaaataatttaatactaaagatgggcccagtggataagcggaagggtttatttgcaagacgacgacagctgttgctcacagaaggaccacatttatattatgtggatcctgtcaacaaagttctgaaaggtgaaattccttggtcacaagaacttcgaccagaggccaagaattttaaaactttctttgtccacacgcctaacaggacgtattatctgatggaccccagcgggaacgcacacaagtggtgcaggaagatccaggaggtttggaggcagcgataccagagccacccggacgccgctgtgcagtgacgtggcctgcggccgggctgcccttcgctgccaggacacctgccccagcgcggcttggccgccatccgggacgcttccagaccacctgccagccatcacaaggggaacgcagaggcggaaaccttgcagcatttttatttaaaagaaaagaagaaaaaaaacacccaaccacacaaagaacaaaaccagtaacaaacacaaaggaattcagggtcgctttgcttgctctctgtgctccgtggaggcctccgtgtgccctcgttgccgtggggacccagctccatgcacgtcaacccagtcccgcccagactagtggacagacctggtgtcaccagtttttcctagcatcagtccgaaccatgcgcccgccctgccccaactgtgtgctggtcctgctgtggccgaggggaccgggtgtgtttggctctttatgcccctcccgctgtggtcctggaactcttcaccagggagggagccctgcgggggccgcagctttgtggagggagccgccgtgcttctgtcacctgctccctttcttgcgtctccctgtgatgggcccttaggcctggctgggcccattacatatccctgtggtggctctggtggcagctttctgtggcccctgctgtgttggcaggcaggtttgcgtggtgaggagcgggaggggttggagtggtgcgggagcaggctgccgagtggagggtgccatcgagggctccggatcccttatcctacttagcagtgttggtctctggggctggaagccgagcgcatgctgggagcggtactgtcagaagtgagcccagttagtaccccgctggctcactgcacgagagagtcctgccccgagccctaggtggggccaggaggtgccttggagaagccagccagagcagagagggctgctgacttccgtgtggagcagagaggcctgagggcctcctaaaaggtttaaatgtccacgcctctccagttgctgaagtagggtctgagagaaccctggcatcagcagacccagggtgcttctgtctcctgcagaccacgccagggagtgcagacaccaccgtcacacacgccccttttgtgttttggttcaagtttctcagagcccctcagagcttctacatctgtgcatcagaaatctcacagccttctcatgctgccggctcatctgggcccatagagtgggctttgccagttgctgttgcacaggaggcgagaacagcacacttcaaccccagcttgctggtcggctttcctctagagagagccggttttggggccatttccctttgatgctttggtggccttgccccgctctgcagcacagacaggccagatgcatttgtcctttgcctagctactccccaggtagagagtgctcctggtggcctggcaggtctgggcccttctctccctgcccaggttgtccctggagggcagccctcactccctttgggggagaggcagacattgctgcccacagacctgcctctgactcaactgtgtccaccctccctggtccctacccccaagtcacaggtgactcagcagtgaccctgtgtgccaggccagatccaaactgagagggaaggtgtcgtttttacactgctaatgacgagagtggctctttttagctaggcgagtacagacggggcctgggagggggcagagatgttccccaggccctgcctgtggttcctgcctgggccttggctgctgctgtgtgagagctgcatgtgagcctgtgaccgtgagctggggtgagctgggccgcacctaccctggggccccagggagcaggacgctccggggcccagcacgttgccctgggcctgtggccggagtcggagtcctctctcctcctcctggcttttggaaaggcttggctgtgttggggagtctctcttagccctttcaggaatttctgttcaggcttcctcctcctcatcagctattttacccatctcagaacgtcctgtgtctccatgtaggagagtggctctctcagatctctcagggcgtctggttatagggaaacaagtggagcagggacgtggctttaattggagcactcggctgggctgcttggggagactcttccgtgcgttcttcctctggatagaaccaccacctcctgggcgtcactgacaagctccatcttaacctccaaagccacagaactaggggctcagagccagagctggcagccgccagccaaaatgatgccattgcctgagctgacagccaagcccttctgtgggtcacctttctcctcacccagccccttgctcttcccttttgaaaggcccgtgtgttttctttccttaccctgtgcttgctcatgtctactccggttttctctaccacatccttagagccatcacctggcacgcaggcgccttacattctacggtagaacgtggggtactgtgtgtgcacatagacacacttacgtggaattacagttgtgggtttatccaagatgaggaagatttcacctgctgtttaatagacttggggccatgtgcctccccacacatgggcaaggacaggtggaatgtcgggaccacactgtgcggcttctcggcacaaagcggagggaggctgtggtcgctgccggcctaggtgtcccaggtgccccgcctttctctgggacacagttgggggctggcttctgagggattcctttctcccctctttgtgtggccccagccagggcggtgggcagtcctggtgtagagcacaagcctctccaccctagagaaatgcctctgtaccacggctaccatgtggaaccttaacttgcagaaggcttgttaacaattgttttgagagagatggctggtcatgccacagctgctggggactccgcctactccagccctcttgggacacactgtgggatttgtggcccttccccagaggaattgtggagactgtcccatggaacaaaccctcaggcaccagcacagggctctgggtgactcagtaaaactaacgtttgtctctgacaagatcagctgtaggctcaccggccagagaagaccactgtgagcattttgccgtatatcctgccctgccatttgttcactttttaaactaaaataggaacatccgacacacaccgtttgcatcgtcttctcccttgatattttaagcattttcccatgtcatgagtttctcagaaacatgtttttaacaattgtactatttagtcattgtccatttactataatttatctgaccatttccctactgtaaaatacttaagacggtttctgatttttccactatttaaataatgctgtgatgaatatctttaaaatcttctgatttcttacttttttcccccttagatgcctggaagtggtattttgaggtgaaagagtttgttcattttgaagatatttctgtctctctctcgacctgatgtgtagacgctcacttccagtagcagaaccaccttagttgtgtcttacagattctgaacaaatcggtttctgataagccatgtgttccaaagaatgtctgaataagaccgctctttatttaaatgctaagaggatgtcactactgcaatccatctgtggccgattttttccaagagccaatttccttgttttggttgcaagaacctggctctgcctgcatgtcagctctctgccctccctgctgccgtggctttcaagcgcttggcagaatcttgtacttcgtgtccacaatggtactgaatttgcatctgcacagtcagcagagataacaagtgttgaactgaccttgccacatgcttagtgagtgatttgtaattaagtttatagactcagaaggtatattaggacatttggaatcagtagcagagcaaagcctctttgaaaaaaaccacgtagctgattgggttttacaagagtgcatttgtctcccccttccacccgtggggccccaccttcaggtcttagtggttcacaagagcccagcagccaggctggctttttcattgtagggcgtggttgtcccagctggtgtagatttcaggccgccccccccaactccctgcccacagtgttgcagattgcctggctggcagcaagtccagaccacccaaatttggttggattcttcatttctccactgtagttggggtccattgattgtgcaggggaacgtgcaggaggtttttctaggcaccgtgttcagtgctgcttcactctaccagagattatggccaaattgcacggaatttggtttcttgccctctgaagcctgagggcccccccttgcctggctggttgacagacccggggtggtcactgctgagacttcagagatcgcagctgctgtgagaatacggtgaaggtactttgttctggaagatgttgtcatacacttttccccagttattttcaaacttgacatgagcctatgttgactcactgggtgggggtcccttcttacgcagcacacgtggcaagtgcctgaatcggggctggaggcacttcagagcctctgaggggccaccacttctggcccaaaattgcagggttgtagatgaggctgcctgtggagaactggtgtgaggaggaagctgtttccaacaaagagcactttcatctgttgagatggctgtggtgagcaactgaacgagcctacgtgtgtacctgaattttccccgtaactcatttcttccatatgaagaaacaccaaactatgtacagagaactttttacaaaaggcagaccttttttaagctgtgtaacccacatagcctaaccacctggcagaatgactacgaataggggtcattgtgctggtaaaagcctctattacgactgtaagtaagttggatgttggcaaaattaaattgttacagtatttagagctgctgtagctgttccttcacaacataaaataggataaatgactagtacgtctttcaggtgggtggcaagcagaacatgcgtaatattctctacctggtctgtagctgtaactgtgatgtacagacaaagcaaaaattaaaagaacttatgaaaacaaatgcaatgatactaggatatacacttttgtatttttattcttatataaggttatttgctggctattgttggcctctagttcagtctgtgttatttaaattctaatatatgaattatttgaattgaattcatgttcggggccacgttgttgtatgtattgatgtacagccttgaatgtgaataattattgtaaactatattttacaactttttttctggctttattatataaattttctattgggtcagtgatttaatcatataatttaatgaatctgtttatcctttttttttttccaaatacttgtgctttaggtgtagttaccagatgatgaattttcctcgtatggtcagtagtcttgtaataaaaagcatgtagagtgta

SEQ ID NO: 124 - DNA, 2952 bp, Homo sapiens
atgcataaagacgagtttcatctgaaatttttcatgtgtgtgattcagtctcgccagttagtcaggactcctcagagaacagctggggaagcttctacttccagcatgctcataccaaagccaccaccaaagacagacatcttgaagagtctagatactatggatgatccagacaccgtgggaagcatacctgttttcaaaactgagtggatcatgacccatgaagagcaccatgcagccaaaaccctggggattggcaaagccattgctgtcttaacctctggtggagatgcccaaggtatgaatgctgctgtcagggctgtggttcgagttggtatcttcaccggtgcccgtgtcttctttgtccatgagggttatcaaggcctggtggatggtggagatcacatcaaggaagccacctgggagagcgtttcgatgatgcttcagctgggaggcacggtgattggaagtgcccggtgcaaggactttcgggaacgagaaggacgactccgagctgcctacaacctggtgaagcgtgggatcaccaatctctgtgtcattgggggtgatggcagcctcactggggctgacaccttccgttctgagtggagtgacttgttgagtgacctccagaaagcaggtaagatcacagatgaggaggctacgaagtccagctacctgaacattgtgggcctggttgggtcaattgacaatgacttctgtggcaccgatatgaccattggcactgactctgccctgcatcggatcatggaaattgtagatgccatcactaccactgcccagagccaccagaggacatttgtgttagaagtaatgggccgccactgtggatacctggcccttgtcacctctctgtcctgtggggccgactgggtttttattcctgaatgtccaccagatgacgactgggaggaacacctttgtcgccgactcagcgagacaaggacccgtggttctcgtctcaacatcatcattgtggctgagggtgcaattgacaagaatggaaaaccaatcacctcagaagacatcaagaatctggtggttaagcgtctgggatatgacacccgggttactgtcttggggcatgtgcagaggggtgggacgccatcagcctttgacagaattctgggcagcaggatgggtgtggaagcagtgatggcacttttggaggggaccccagataccccagcctgtgtagtgagcctctctggtaaccaggctgtgcgcctgcccctcatggaatgtgtccaggtgaccaaagatgtgaccaaggccatggatgagaagaaatttgacgaagccctgaagctgagaggccggagcttcatgaacaactgggaggtgtacaagcttctagctcatgtcagacccccggtatctaagagtggttcgcacacagtggctgtgatgaacgtgggggctccggctgcaggcatgaatgctgctgttcgctccactgtgaggattggccttatccagggcaaccgagtgctcgttgtccatgatggtttcgagggcctggccaaggggcagatagaggaagctggctggagctatgttgggggctggactggccaaggtggctctaaacttgggactaaaaggactctacccaagaagagctttgaacagatcagtgccaatataactaagtttaacattcagggccttgtcatcattgggggctttgaggcttacacagggggcctggaactgatggagggcaggaagcagtttgatgagctctgcatcccatttgtggtcattcctgctacagtctccaacaatgtccctggctcagacttcagcgttggggctgacacagcactcaatactatctgcacaacctgtgaccgcatcaagcagtcagcagctggcaccaagcgtcgggtgtttatcattgagactatgggtggctactgtggctacctggctaccatggctggactggcagctggggccgatgctgcctacatttttgaggagcccttcaccattcgagacctgcaggcaaatgttgaacatctggtgcaaaagatgaaaacaactgtgaaaaggggcttggtgttaaggaatgaaaagtgcaatgagaactataccactgacttcattttcaacctgtactctgaggaggggaagggcatcttcgacagcaggaagaatgtgcttggtcacatgcagcagggtgggagcccaaccccatttgataggaattttgccactaagatgggcgccaaggctatgaactggatgtctgggaaaatcaaagagagttaccgtaatgggcggatctttgccaatactccagattcgggctgtgttctggggatgcgtaagagggctctggtcttccaaccagtggctgagctgaaggaccagacagattttgagcatcgaatccccaaggaacagtggtggctgaaactgaggcccatcctcaaaatcctagccaagtacgagattgacttggacacttcagaccatgcccacctggagcacatcacccggaagcggtccggggaagctgccgtctaaacctctctggagtgaggggaatagattacctgatcatggtcagctcacaccctaataagtccacatcttctcagtgttttagctgtttttttcattaggtttccttttattctgtaccttgcagccatgaccagttctggccaggagctggaggagcaggcagtgggtgggagctccttttaggtagaatttaacatgacttctgccccagctttatctgtcacacaaggctgggcacctctagtgctactgctagatatcacttactcagttagaattttcctaaaaataagctttatttatttctttgtgataacaaagagtcttggttcctctactacttttactacagtgacaaattgtaactacactaataaatgccaactggtcactgtg

SEQ ID NO: 125 - DNA, 920 bp, Homo sapiens
agagccggcgccgtcaccgcccgcattgccgctcccagtcccgcgctcggcacgacatgaaatcccccgacgaggtgctacgcgagggcgagttggagaagcgcagcgacagcctcttccagctatggaagaagaagcgcggggtgctcacctccgaccgcctgagcctgttccccgccagcccccgcgcgcgccccaaggagctgcgcttccactccatcctcaaggtggactgcgtggagcgcacgggcaagtacgtgtacttcaccatcgtcaccaccgaccacaaggagatcgacttccgctgcgcgggcgagagctgctggaacgcggccatcgcgctggcgctcatcgatttccagaaccgccgcgccctgcaggactttcgcagccgccaggaacgcaccgcacccgccgcacccgccgaggacgccgtggctgccgcggccgccgcaccctccgagccctcggagccctccaggccatccccgcagcccaaaccccgcacgccatgagcccgccgcgggccatacgctggacgagtcggaccgaggctaggacgtggccggcgctctccagccctgcagcagaagaacttcccgtgcgcgcggatcctcgctccgttgcacgggcgccttaagttattggactatctaatatctatgtatttatttcgctggttctttgtagtcacatattttatagtcttaatatcttgtttttgcatcactgtgcccattgcaaataaatcacttggccagtttgcttttctaccatccggctgtggctcagtgagactcctgctgggagggtggaggcccaggaatgggcgggcaggacaccctcatccagtcctgcggggctggtgtgaaaggcgctgggaaccggctttgaatgaataaatgaatcgtgtcatctgc

SEQ ID NO: 126 - DNA, 3429 bp, Homo sapiens
cgagacggggaagccgcgcgcggggaaggagggtccaggcgtgccggacccgcccccagaacccgcgcctagccctcccttccgcgcgcttactttgtttataacttgaaaaatcctctccgtctcccttccctgcctcctttcctttccctttcctctgccagtacaactagacccggcgtctggcgtccccggtgcccagcattctgcggggcaggcggtctcgcttgattgggtttctcatgggtctctggcgtttctacggcgcggctctcacggactcaggccaggccactcgcagcttggagacacatagggcaccgtacaacaaactccagctccagaggattaattggaattcttcaaaatgtcaggtgtggtacccacagcccctgaacagcctgcaggtgaaatggaaaatcaaacaaaaccaccagatccaaggcctgatgctcctcctgaatacaattctcattttttaccaggaccccctggaacagctgtccctccacctactggctacccaggaggcttgcctatgggatactacagtccacagcaacccagtaccttccctttgtaccagccagttggtggtatccatcctgtccggtatcagcctggcaaatatcctatgccaaatcagtctgttccaataacatggatgccagggccaactcctatggcaaactgccctcctggtctggaatacttagttcagttggacaacatacatgttcttcagcattttgagcctctggaaatgatgacatgttttgaaactaataatagatatgatattaaaaacaactcagaccagatggtttacattgtaaccgaagacacagatgactttaccaggaatgcctatcggacactaaggcccttcgtcctccgggtcactgattgtatgggccgagaaatcatgacaatgcagagacccttcagatgcacctgctgttgcttctgttgcccctctgccagacaagagctggaggtgcagtgtcctcctggtgtcaccattggctttgttgcggaacattggaacctgtgcagggcggtgtacagcatccaaaatgagaagaaagaaaatgtgatgagagttcgtgggccatgctcaacctatggctgtggttcagattctgtttttgaggtcaaatcccttgatggcatatccaacatcggcagtattatccggaagtggaatggtttgttatcagcaatggcagatgctgaccattttgacattcacttcccactagacctggatgtgaagatgaaagccatgatttttggagcttgcttcctcattgacttcatgtattttgaaagatctccaccacaacgttcaagatagagagacacagcaagccatcaactatggttaattttgaaaaatggaaaagttggattgggcttacagtcagcactcagttatttgcaagtgtatttctttgctttgtagagtatttttattgggtgttaactttgacagctgagagtgggcttgcaagaacacaatctaaaagtgtgtttcaattgagtatctctctagtagaataggagttcatcctgaaaagctgtgactcattaacccagtaaacatatacaaagtaagcttaaaacactataaacatgagataagggaaaatgaatccagagttctcatattaataggtagtgaaacaataaggctttttagagcagactttgttggcataaaataacctggcttctatccctaaccctttcctacctttcctctccgtcaacatgtcctcatactgaagacaaacttgtttcaatgatagtcttcatttttaaaaacaaaaaggcaggcagacagaaataatgatgttttcttgcactaagaaggtactacttgtacacatatatcaaaacctcattctgcaaagtttttgaaggtttcaatgggaaatttgattttattacaaaataaaacattttttaatgttaaagtttatatattccatgcttgttttctcattcactggcatggatgatcaggagctgcctatatatgaaggcagaatcagactatcaggaaaggagctggccagggccacagccagtcaagatctctgagcaacttagagacattggtgtcattatatgaagcttgcatttaatacatttatacataatacatttgtacatttaattcataacgtctcttggtcacagatgccttatatataaaataagttgccagatctctaagattgcctagtacacctttgtatctcatttgatgtgatacccagaagagatcattgttttttgtttttgtttttgtttttttcaagaagatccttcgtgatcaccatgctgttctcatggtaagaactggagttatgtttttaaatttggaaatatgacattttatgtagcactttataaaaagtgaaagcgacaaattccaccgctgcttaatactgctttgcttctttttattgacatgatagataaatatgtatctacacagagtaataataataaaacacagtaaacattctatttctctatggtctacagcatgccagtaaataatatgtaggaccaataataaattatcaattacacatttttgtgttaactaattaaaagcatagtgtataagtgagtacactctaattaacttgcttctgttgcactttagttttctacctgcatatggactgcattttttttttttaacacagtcagtatgtagaatgggatgtattcttctgctgctgcttattaaataaagaaagcctgagtgttcttagatggggttattctgagatgagggtcttagcctacagttctttttgaaatgaaaggtgctttgttttttaattatattcatcttttcagggtaaatttgtttttctgagtttctcgtaatgctcatttttacatgctgctactagcttttttttttaaaaaaagtaaaagttgctgctttctaaaatattaattgccttatatttgaaagtgccattgcaatcgtaagtagactatgtatttcctataatgatgtctgatatttaaataggaaatcagacaaacaatattcagaaagtttaagcatataaactttttatttttaacttgcctaaatccctgtattccaaaacctgctgcatcataataaatatatctatatatatttagcataagacgtgatatttttaatttcttttttaaaaaattatatttgtctcttagagttaaaattttctttatataatattgtcatatgtcatagttttaatacaattcacatgatttctatgtttcttaatgatattttgttgtgtaaaattgatcggattgattaaaaaacaaattctctggaatttgtgcgttcatgctttttcgtattctttatggcttttaaataaatatacaatggttaatagt

SEQ ID NO: 127 - DNA, 1660 bp, Homo sapiens
aagaaggaggccgcgcgagggctgacgaaccggaagaagaggaactgggcctgaaagggtaccggtgaccgctactgctgccggtgtttgcgtgtggcagggagccaggcctggcgagcggggtgtgtcgcgatgccggagctggcagtgcagaaggtggtggtccaccccctggtgctgctcagtgtggtggatcatttcaaccgaatcggcaaggttggaaaccagaagcgtgttgttggtgtgcttttggggtcatggcaaaagaaagtacttgatgtatcgaacagttttgcagttccttttgatgaagatgacaaagacgattctgtatggtttttagaccatgattatttggaaaacatgtatggaatgtttaagaaagtcaatgccagggaaagaatagttggctggtaccacacaggccctaaactacacaagaatgacattgccatcaacgaactcatgaaaagatactgtcctaattccgtattggtcatcattgatgtgaagccgaaggacctagggctgcctacagaagcgtacatttcagtggaagaagtccatgatgatggaactccaacctcgaaaacatttgaacacgtgaccagtgaaattggagcagaggaagctgaggaagttggagttgaacacttgttacgagatatcaaagacacgacggtgggcactctgtcccagcggatcacaaaccaggtccatggtttgaagggactgaactccaagcttctggatatcaggagctacctggaaaaagtcgccacaggcaagctgcccatcaaccaccagatcatctaccagctgcaggacgtcttcaacctgctgccagatgtcagcctgcaggagttcgtcaaggccttttacctgaagaccaatgaccagatggtggtagtgtacttggcctcgctgatccgttccgtggtcgccctgcacaacctcatcaacaacaagattgccaaccgggatgcagagaagaaagaagggcaggagaaagaagagagcaaaaaggataggaaagaggacaaggagaaagataaagataaggaaaagagtgatgtaaagaaagaggagaaaaaggagaaaaagtaaaacatgtattaaatagcttttttaatttgtaaattaaaatcttacaaactaaatcagtgtgctgctagagggttctttttcacttgacatgcttattagaaagctgacccaacaagagctctctgcctccggtcactcttgctgtggtgctacgtggaagtgaatggagactgatctcaaatctgaactgcagctttcgctgctgtgagttggggatatgatagtcagctcaggcttcagattgtatgagaaaaatgaagagaagtcaacaaatattttggtactcttcattcatttatctctaaaaccaggagttgaattttcctcatcttgaaagactcttggggtctgtttctggtattttacaaaattgctaagtggaatgcatgaattgcattatgttctctggtaacacgtagagttcagacccttctgaactctgttgataataccacaccatgttctggacccatagctctggcatcctcaggggttgtgatccagctccatatattgtttaccttcaaagatacaattaaatggcttgattttt

SEQ ID NO: 128 - DNA, 3281 bp, Homo sapiens
tgcgggcgtctccgccattttgtgagtctataactcggagccgttgggtcggttcctgctattccggcgcctccactccgtcccccgcgggtctgctctgtgtgccatggacggcattgtcccagatatagccgttggtacaaagcggggatctgacgagcttttctctacttgtgtcactaacggaccgtttatcatgagcagcaactcggcttctgcagcaaacggaaatgacagcaagaagttcaaaggtgacagccgaagtgcaggcgtcccctctagagtgatccacatccggaagctccccatcgacgtcacggagggggaagtcatctccctggggctgccctttgggaaggtcaccaacctcctgatgctgaaggggaaaaaccaggccttcatcgagatgaacacggaggaggctgccaacaccatggtgaactactacacctcggtgacccctgtgctgcgcggccagcccatctacatccagttctccaaccacaaggagctgaagaccgacagctctcccaaccaggcgcgggcccaggcggccctgcaggcggtgaactcggtccagtcggggaacctggccttggctgcctcggcggcggccgtggacgcagggatggcgatggccgggcagagccccgtgctcaggatcatcgtggagaacctcttctaccctgtgaccctggatgtgctgcaccagattttctccaagttcggcacagtgttgaagatcatcaccttcaccaagaacaaccagttccaggccctgctgcagtatgcggaccccgtgagcgcccagcacgccaagctgtcgctggacgggcagaacatctacaacgcctgctgcacgctgcgcatcgacttttccaagctcaccagcctcaacgtcaagtacaacaatgacaagagccgtgactacacacgcccagacctgccttccggggacagccagccctcgctggaccagaccatggccgcggccttcggtgcacctggtataatctcagcctctccgtatgcaggagctggtttccctcccacctttgccattcctcaagctgcaggcctttccgttccgaacgtccacggcgccctggcccccctggccatcccctcggcggcggcggcagctgcggcggcaggtcggatcgccatcccgggcctggcgggggcaggaaattctgtattgctggtcagcaacctcaacccagagagagtcacaccccaaagcctctttattcttttcggcgtctacggtgacgtgcagcgcgtgaagatcctgttcaataagaaggagaacgccctagtgcagatggcggacggcaaccaggcccagctggccatgagccacctgaacgggcacaagctgcacgggaagcccatccgcatcacgctctcgaagcaccagaacgtgcagctgccccgcgagggccaggaggaccagggcctgaccaaggactacggcaactcacccctgcaccgcttcaagaagccgggctccaagaacttccagaacatattcccgccctcggccacgctgcacctctccaacatcccgccctcagtctccgaggaggatctcaaggtcctgttttccagcaatgggggcgtcgtcaaaggattcaagttcttccagaaggaccgcaagatggcactgatccagatgggctccgtggaggaggcggtccaggccctcattgacctgcacaaccacgacctcggggagaaccaccacctgcgggtctccttctccaagtccaccatctaggggcacaggcccccacggccgggccccctggcgacaacttccatcattccagagaaaagccactttaaaaacagctgaagtgaccttagcagaccagagattttatttttttaaagagaaatcagtttacctgtttttaaaaaaattaaatctagttcaccttgctcaccctgcggtgacagggacagctcaggctcttggtgactgtggcagcgggagttcccggccctccacacccggggccagaccctcggggccatgccttggtggggcctgtgtcgggcgtggggcctgcaggtgggcgccccgaccacgacttggcttccttgtgccttaaaaaacctgccttcctgcagccacacacccacccggggtgtcctggggacccaaggggtgggggggtcacaccagagagaggcagggggcctggccggctcctgcaggatcatgcagctggggcgcggcggccgcggctgcgacaccccaaccccagccctctaatcaagtcacgtgattctcccttcaccccgcccccagggccttcccttctgcccccaggcgggctccccgctgctccagctgcggagctggtcgacataatctctgtattatatactttgcagttgcagacgtctgtgcctagcaatatttccagttgaccaaatattctaatcttttttcatttatatgcaaaagaaatagttttaagtaactttttatagcaagatgatacaatggtatgagtgtaatctaaacttccttgtggtattaccttgtatgctgttacttttattttattccttgtaattaagtcacaggcaggacccagtttccagagagcaggcggggccgcccagtgggtcaggcacagggagccccggtcctatcttagagcccctgagcttcagggaaggggcgggcgtgtcgccgcctctggcatcgcctccggttgccttacaccacgccttcacctgcagtcgcctagaaaacttgctctcaaacttcagggttttttcttccttcaaattttggaccaaagtctcatttctgtgttttgcctgcctctgatgctgggacccggaaggcgggcgctcctcctgtcttctctgtgctctttctaccgcccccgcgtcctgtcccgggggctctcctaggatcccctttccgtaaaagcgtgtaacaagggtgtaaatatttataattttttatacctgttgtgagacccgaggggcggcggcgcggttttttatggtgacacaaatgtatattttgctaacagcaattccaggctcagtattgtgaccgcggagccacaggggaccccacgcacattccgttgccttacccgatggcttgtgacgcggagagaaccgattaaaaccgtttgagaaactcctcccttgtctagccctgtgttcgctgtggacgctgtagaggcaggttggccagtctgtacctggacttcgaataaatcttctgtatcctcgctccgttccgcctt

SEQ ID NO: 129 - DNA, 4564 bp, Homo sapiens
gaccactgtgagcccgcggcgtgaggcgtgggaggaagcgcggctgctgtcgcccagcgccgccccgtcgtcgtctgccttcgcttcacggcgccgagccgcggtccgagcagaactggggctcccttgcatcttccagttacaaattcagtgccttctgcagtttccccagagctcctcaagaataacggaagggagaatatgacagatacctagcatctagcaaaataatggcagctgcttaccttgaccccaacttgaatcacacaccaaattcgagtactaagactcacctgggtactggtatggaacgttctcctggtgcaatggagcgagtattaaaggtctttcattattttgaaagcaatagtgagccaaccacctgggccagtattatcaggcatggagatgctactgatgtcaggggcatcattcagaagatagtggacagtcacaaagtaaagcatgtggcctgctatggattccgcctcagtcacctgcggtcagaggaggttcactggcttcacgtggatatgggcgtctccagtgtgagggagaagtatgagcttgctcacccaccagaggagtggaaatatgaattgagaattcgttatttgccaaaaggatttctaaaccagtttactgaagataagccaactttgaatttcttctatcaacaggtgaagagcgattatatgttagagatagctgatcaagtggaccaggaaattgctttgaagttgggttgtctagaaatacggcgatcatactgggagatgcggggcaatgcactagaaaagaagtctaactatgaagtattagaaaaagatgttggtttaaagcgattttttcctaagagtttactggattctgtcaaggccaaaacactaagaaaactgatccaacaaacatttagacaatttgccaaccttaatagagaagaaagtattctgaaattctttgagatcctgtctccagtctacagatttgataaggaatgcttcaagtgtgctcttggttcaagctggattatttcagtggaactggcaatcggcccagaagaaggaatcagttacctaacggacaagggctgcaatcccacacatcttgctgacttcactcaagtgcaaaccattcagtattcaaacagtgaagacaaggacagaaaaggaatgctacaactaaaaatagcaggtgcacccgagcctctgacagtgacggcaccatccctaaccattgcggagaatatggctgacctaatagatgggtactgccggctggtgaatggaacctcgcagtcatttatcatcagacctcagaaagaaggtgaacgggctttgccatcaataccaaagttggccaacagcgaaaagcaaggcatgcggacacacgccgtctctgtgtcaggagtcagtcactgccaacataaagttaagaaagctaggcgctttctccctttggtcttctgttcccatgatcctccttctacggatgaaattagtggggacgaaacagatgattatgctgagattatagatgaagaagatacttacaccatgccctcaaccagggattatgagattcaaagagaaagaatagaacttggacgatgtattggagaaggccaatttggagatgtacatcaaggcatttatatgagtccagagaatccagctttggcggttgcaattaaaacatgtaaaaactgtacttcggacagcgtgagagagaaatttcttcaagaagccttaacaatgcgtcagtttgaccatcctcatattgtgaagctgattggagtcatcacagagaatcctgtctggataatcatggagctgtgcacacttggagagctgaggtcatttttgcaagtaaggaaatacagtttggatctagcatctttgatcctgtatgcctatcagcttagtacagctcttgcatatctagagagcaaaagatttgtacacagggacattgctgctcggaatgttctggtgtcctcaaatgattgtgtaaaattaggagactttggattatcccgatatatggaagatagtacttactacaaagcttccaaaggaaaattgcctattaaatggatggctccagagtcaatcaattttcgacgttttacctcagctagtgacgtatggatgtttggtgtgtgtatgtgggagatactgatgcatggtgtgaagccttttcaaggagtgaagaacaatgatgtaatcggtcgaattgaaaatggggaaagattaccaatgcctccaaattgtcctcctaccctctacagccttatgacgaaatgctgggcctatgaccccagcaggcggcccaggtttactgaacttaaagctcagctcagcacaatcctggaggaagagaaggctcagcaagaagagcgcatgaggatggagtccagaagacaggccacagtgtcctgggactccggagggtctgatgaagcaccgcccaagcccagcagaccgggttatcccagtccgaggtccagcgaaggattttatcccagcccacagcacatggtacaaaccaatcattaccaggtttctggctaccctggttcacatggaatcacagccatggctggcagcatctatccaggtcaggcatctcttttggaccaaacagattcatggaatcatagacctcaggagatagcaatgtggcagcccaatgtggaggactctacagtattggacctgcgagggattgggcaagtgttgccaacccatctgatggaagagcgtctaatccgacagcaacaggaaatggaagaagatcagcgctggctggaaaaagaggaaagatttctgaaacctgatgtgagactctctcgaggcagtattgacagggaggatggaagtcttcagggtccgattggaaaccaacatatatatcagcctgtgggtaaaccagatcctgcagctccaccaaagaaaccgcctcgccctggagctcccggtcatctgggaagccttgccagcctcagcagccctgctgacagctacaacgagggtgtcaagccatggaggcttcagccccaggaaatcagcccccctcctactgccaacctggaccggtcgaatgataaggtgtacgagaatgtgacgggcctggtgaaagctgtcatcgagatgtccagtaaaatccagccagccccaccagaggagtatgtccctatggtgaaggaagtcggcttggccctgaggacattattggccactgtggatgagaccattcccctcctaccagccagcacccaccgagagattgagatggcacagaagctattgaactctgacctgggtgagctcatcaacaagatgaaactggcccagcagtatgtcatgaccagcctccagcaagagtacaaaaagcaaatgctgactgctgctcacgccctggctgtggatgccaaaaacttactcgatgtcattgaccaagcaagactgaaaatgcttgggcagacgagaccacactgagcctcccctaggagcacgtcttgctaccctcttttgaagatgttctctagccttccaccagcagcgaggaattaaccctgtgtcctcagtcgccagcacttacagctccaacttttttgaatgaccatctggttgaaaaatctttctcatataagtttaaccacactttgatttgggttcattttttgttttgtttttttcaatcatgatattcagaaaaatccaggatccaaaatgtggcgtttttctaagaatgaaaattatatgtaagcttttaagcatcatgaagaacaatttatgttcacattaagatacgttctaaagggggatggccaaggggtgacatcttaattcctaaactaccttagctgcatagtggaagaggagagcatgaagcaaagaattccaggaaacccaagaggctgagaattcttttgtctaccatagaattattatccagactggaatttttgtttgttagaacacccttcagttgcaatatgctaatcccactttacaaagaatataaaagctatattttgaagacttgagttatttcagaaaaaactacagccctttttgtcttacctgccttttactttcgtgtggatatgtgaagcattgggtcgggaactagctgtagaacacaactaaaaactcatgtcttttttcacagaataatgtgccagttttttgtagcaatgttatttctcttggaagcagaaatgctttgtaccagagcacctccaaactgcattgaggagaagttccagaaccatcccctttttccatttttatataatttataaagaaagattaaagccatgttgactattttacagccactggagttaactaacccttccttgtatctgtcttcccaggagagaatgaagcaaaacaggaatttggttttcttttgatgtccagttacaccatccattctgttaattttgaaaaaatataccctccctttagtttgttgggggatataaattattctcaggaagaatataatgaactgtacagttactttgacctattaaaaaggtgttaccagtaaa

SEQ ID NO: 130 - DNA, 7900 bp, Homo sapiens
tgaactgaggcgaactccgccgccaagtgagtgaggaggaggaggaggagaaggaggaggaggaagaggaggagcgcagtcggagcgcggcggcagcggcagaggcgccgcggcggggaccagcccagagagaccccccgagcccgcggcacaggcggcggcggcgctgagcgggctcgaccagccgagcgagcggcggccccggctcctcctcgtccggcgccagcagcccgcgccccgcgcccgcactcggccagccgagacccgcctcccgcccgcccgccggcctcgtgagggacgcgccgagccgggcggccgagagcggcggcggctgggagcgcgtcgggcccgggcggaaagtgcctgcggggggcgggcgagcgcgcggtgccggccgccccggggctcggcgcgggagccagagcgggagccggcgcggagcgggacgccgggtcccgagcggcccgcggccggggctcgcccccgcccctccctcctctccggcggcggcggcggcggcggcgggcggagtgagctgcggagcctggaatatggtcggggaaatggaaacgaaggagaagccgaagcccaccccagattacctgatgcagctgatgaacgacaagaagctcatgagcagcctgcccaacttctgcgggatcttcaaccacctcgagcggctgctggacgaagaaattagcagagtacggaaagacatgtacaatgacacattaaatggcagtacagagaaaaggagtgcagaattgcctgatgctgtgggacctattgttcagttacaagagaaactttatgtgcctgtaaaagaatacccagattttaattttgttgggagaatccttggacctagaggacttacagccaaacaacttgaagcagaaaccggatgtaaaatcatggtccgaggcaaaggctcaatgagggataaaaaaaaggaggagcaaaatagaggcaagcccaattgggagcatctaaatgaagatttacatgtactaatcactgtggaagatgctcagaacagagcagaaatcaaattgaagagagcagttgaagaagtgaagaaattattggtacctgcagcagaaggagaagacagcctgaagaagatgcagctgatggagcttgcgattctgaatggcacctacagagatgccaacattaaatcaccagcccttgccttttctcttgcagcaacagcccaggctgctccaaggatcattactgggcctgcgccggttctcccaccagctgccctgcgtactcctacgccagctggccctaccataatgcctttgatcagacaaatacagaccgctgtcatgccaaacggaactcctcacccaactgctgcaatagttcctccagggcccgaagctggtttaatctatacaccctatgagtacccctacacattggcaccagctacatcaatccttgagtatcctattgaacctagtggtgtattaggtaagttcttctccccatggggttaacaacattctctttataaatatttttgctccctcagattttgaaatgattttatcagttttagagaggcaagacaagtttgcattagggaagaccgaaaactaaattttgttttatttcagcctctcataagggttcccctttgaaataattgcaccttaaatttattcagatccactttggtaactgaggttcagtttggttgggtaaatctgttgtgtacatttcaacaaatacttttacatttgacattactgaggtcattctgagttttaggtcccaccccattggcccgtcacctccatcagctccacttctcaaactttatttgagatttattttatctcacaggtttgtgtaattgttggaaaatttttaaacttctaagtgaaagtagtctgagcgctttataaaattcatattattgtgtgtgttttgtaatatttgcgatcacttaaaatatcagataaatacagtcatgcatcgcttaacaacggggatacagtctaagaattgccttgtctggcagtttcatcatttggtgtacatcatagagtgtacttacacagacatagatgatatcgtttactacacacctaggctgtgtggtatagccattataatcttatgggaccacatagtataagtggtccgttgttgaccaaaatgttgttatgcaggcatgactgtagttgtattcttaagatttttcagttcttgtgttttggagtcctagtcatattaaacatgagagatactcttaatttcagtagtacagtatggaatagttaaataaatagcaaatcactgaattcagaatctcacttaaggcagaaattaaaatcataatataaacgcttggttttacatgaacaaaaagtggtgtgctcgaaaaagacattactgatgccttttttttatagagtggattgaaatgccagtcatgcctgatatttcagcccattgacttgctggatgaaggactagaatacagcagctgttataacacgaccagtcaatgtggaacaaactgtttctgtgcaacccctttgttttaccagacaaaatttgaatactttttttcctgaattgtatatgaccttggtgctgcatgcatgctgttgacttttaggactttgatcttttaaggttttttttccccagcattaatattgatttataaagatttgaaaatctttaatgaactggagaacactaagatttaaactcgaaaattcgttgttcaagtaaagaaagccatgatgctctgtatgttatctgtgtgtgtgcatgcactcaggtgccctttgtttcatgaacaaatacatttcattgtacatgttttctgtttaaatcattgtataaagtaattgcaggtcagaattataccacagaactgtttatgagaggcttgtgtctgttgcacatttcttgaagcatttttaaaataacatgtaacctgtaaccttgttgtttaagttttcttttctattaatactctgtcctgtggtcccgtgcatgctccttttcccagaactcctctctgctgcacccacagcatctgttcccgaggagttatgactcttgacttcctgcagggctggggctcttagccaccagctgctgttccagcactttcagcgcaagatctccctgattttgccacgtggaattgtacttgtatatgattaccttatctaaaatgaataagaggtgatggaccagtttactgcttagaaatagcaagaggcactgcagtaaaacttgtttctcattgtaaagcttcatgtcttttgtttgttggaaaatttttacttatagaaacttaattattagactggtaaaataaagaccaaaatatgcagatttctaattggcattcataaggtgaataataataagtgcccaatgaaaaaatctattatggttaatttcatttcttgctttgccacctaagcagtaaaacatgatattgaccacttggagaactcagaaaattattttaaatttctaagttataataaatttgcacacagataacatgcatgctatttatgtcacatctcacattaaattattttaaaataagcagtgcccttcaaaacagatgcagacatgtgtgttggtagtagtgaggagattggtattagcatcaagtcttcattgatgactaatttttaattcccttccttttatctttaggtatggctttcccaacgaaaggctaagaattcaagaacggtcttaactgaaccctcatcagatctgaatttaacaaatgcttagtctcagcagcctccgggggaaaaaagcttagcctagcagtcagtgacttacttgcactttttgcacatagatataaagtaaaattatgttattaatttggtttagtctgtaatattacacagtaatggtaatttataaaggagtgtatagtagtatactgactgctaagtgtactatactgtttgctttactaatcacctaattcattgcagttcatacttattgactcagagtttaaaaccacaatctgtaggctttaagaattgcttttaaacctttttaagtgataaactcttgaagtggtcttaaggttagcaaataattgtctgtattaaacatggcgttatttaagtagtcctgctgcaagaaaggcacttcagtgaatatgtgactagtaaagcttaaatatgtttggatctaatagagctcatgaaatactgtaacttggggattgtaaatgaatggatacaataggttaaggcccaagatgtttgaaatgaatgcaatattaatagatgcatatatacatgacatattgtggttaattttaaaactactgtgccttaacgtgtttcttaaacttttgtagtaaatgaacatttgaaatccattttgataaacctgctgttaatgttttttccccccttgtgaatgttttctaactttgtcttggtaattgcaatttaactaggtgcggtggctactaaagttcgaaggcacgatatgcgtgtccatccttaccaaaggattgtgaccgcagaccgaggttagtttagttctgcagttcttgtctataagaaatgcgttgggtgtccataaaatttgcaacaccacacctgatggaaaaatgtaattgcttacctgcacacagttttttttccttttctaaatttgtttgtgatcattgacagatttaagggttgggttttttgttttggtttggttttttctcccttcatattttaacttattaaatcttctattattatgtactatgatttattcctactaaaacataaattagtcaatttggggagctattaaattttgatgttgcctcagttattttcattaataacttttgctaaaatttaccttttaaaagttctgaaatttggggttggtattgcaaaatgaattgaacggatggtgctttaatgagagaagtaaaggaatatatgcctcctgtgtacttttggagaaaactgaagatttagtttccatttttctttataataaaatatttgagccactgtataaacatgagggtgcacatgtcaagtacttagctaaaatcaacaaagtgaggactgtgaagataactttcatgtagttggatttttttatataaattagagcgtcaattcccttttattcttacattctcttgccaaaatggatcctttgatttttgtcatttgctgctaaaatatattatctgaaggtaaactgtctcttgaagttctgtggtggtatgagatccagctgtgtgaatataatttttgactaacctgtgactggaaaataagtcttcatttttctcctttacaacttttataatttgtgtcctgtatatgcccttggacccttttataaattatttttgcttattgaggaatggtattttcggtttattgacattgaattgttttctaagtttttccatcacaagataggaatatcaagcatggtagtaaaaaaggattttttacaagtttctattatggcacatttgtttcctacaaattaaattgatcaaagtctcaaatattagtggaggaaaaagtgctggatttgtacttcaattgtacatcttctatgaatttatgaaggacctacctgctttatgtgattaccttgagtactgatgataaatactagacacagctgttgtccacatcagaaataacatgcctttcccaaagacattgttaatatttgtttagcataatccataaagaacgttgaagacttttaaactaatgtattcatcactaacagtgattgttcagtgaacaaaatagaccccagctccgtggtcgtctatgaggatggtattccttgtaagtgttctgtatgagcacgtctcatagggatggggaagttttttggaaagtcacttgagttttaaagaaactggacaattccatgaataatttgaggttttattcatattgctaatgtctacaattgttctaaagagtattttaaagtagtttttttcccccagctaatctttccctatgtatgcccccttttaggagatttctcaccattttgctttaacacaataattattggcctacttaatactccagtgccttgagatagttggacatattttaggaagattttattgtatttggaaaattacgacacattccatgcatggatcttttgtagttacgtgttttgattagtcctgtcactgtttttatttaaaatgcagtgtcagcaaaccgaaatgctcatttcttttttagtaacagagtactcgtatacttatcactgtatgcactcattgggtctaagggagatgtctgaagtccttcacttaaattattttatgatactactgttttctctatttttgaggttaaaattattttaaaaaaatattttgaagagaagtttattagtataagcattcatttaatgcaaaaaaactcagcccttggacatataaccatgtaattctatatgaacgtttagagtactacatggttgaccaatatctagttctttactaaaagtaaactcacctctttatatatatttcaaaactgaatttgaagcctattagagaccaactgaccttttagttgtaatgaactgtatggtcttgcatggtgacacacctgtgtaggaggccaagacttggcagaggatgtagtctaggtgtcctggtatatataaatggtcactcacttcgtttatatattccacactcagaaaagaagtcagagttttttctgagtaatacaaaaaccatcacttacataatttgtataagaaactttaaacagttttaatcaaaactatgagtaacatcaaaaatgctttaagattctatattttggaatacctgtgaagtagtatgactacatcatgttaaatatttattttcttctatgattttggagcagcaatttttattttaaataaaattccacttttaagaaattcagggaagatttggtcacattgaagatacagtatttttgtagtatttataaactgttctaaatgatagactatagaaaacatttttgtcatatgaaggtaaatcagtccattattttggatcatttaaactgaacattacaccttctgggctttgatttatgaagtggcacagaatctaactttgcactgaatatcttttcattcacatctcctctgccttagtcacaatggcaacagtacagaaaattctatcaaacctcagaatatagtagaaataattaagctgttgaatgagtcttaaaaattatactactgttaagtggaccaagtttggtgaagcagaatgtgacaaaggttgattaaggaaggaacaactcaaggacattgggaatgataacttttccacttgagaactactttatgttttactgtaatttttaaagtttttttgtcctttttgttattttgcaaaagaaaatagtatttacaggtggcttcttttaaaatataaaaatataaagcaggaatgtatatgaaatgtcagattttattgtatttgcagagtattagctttgaaattgaataaagaaagctgtttgtagttttaaaatgccttattggtatcaattagaaatttcttctattttttgatgtacttagagctttttgagtgtagaattttaaatggcaggattttacagtgtttacatgcaagtgcattttataagtgttctatatgtgtaaaatagtattttcaactggaaagtgttggctagtgcaaaaggcctggccattttctggttcccatgatgttgcctacactgctagactacagtttagtatcgctttgtatcatgaggccaagaaattccatgttgtttgtaaatagaataattgaaaaagcaataaacatttattg

SEQ ID NO: 131 - DNA, 2792 bp, Homo sapiens
aagtgatctgtggcggctgctgcagagccgccaggaggagggtggatctccccagagcaaagcgtcggagtcctcctcctccttctcctcctcctcctcctcctcctccagccgcccaggctcccccgccacccgtcagactcctccttcgaccgctcccggcgcggggccttccaggcgacaaggaccgagtaccctccggccggagccacgcagccgcggcttccggagccctcggggcggcggactggctcgcggtgcagattcttcttaatcctttggtgaaaactgagacacaaaatggctgcaaataagcccaagggtcagaattctttggctttacacaaagtcatcatggtgggcagtggtggcgtgggcaagtcagctctgactctacagttcatgtacgatgagtttgtggaggactatgagcctaccaaagcagacagctatcggaagaaggtagtgctagatggggaggaagtccagatcgatatcttagatacagctgggcaggaggactacgctgcaattagagacaactacttccgaagtggggaggggttcctctgtgttttctctattacagaaatggaatcctttgcagctacagctgacttcagggagcagattttaagagtaaaagaagatgagaatgttccatttctactggttggtaacaaatcagatttagaagataaaagacaggtttctgtagaagaggcaaaaaacagagctgagcagtggaatgttaactacgtggaaacatctgctaaaacacgagctaatgttgacaaggtattttttgatttaatgagagaaattcgagcgagaaagatggaagacagcaaagaaaagaatggaaaaaagaagaggaaaagtttagccaagagaatcagagaaagatgctgcattttataatcaaagcccaaactcctttcttatcttgaccatactaataaatataatttataagcattgccattgaaggcttaattgactgaaattactttaacattttggaaattgttgtatatcactaaaagcatgaattggaactgcaatgaaagtcaaatttactttaaaaagaaattaatatggcttcaccaagaagcaaagttcaacttatttcataattgcctacatttatcatggtcctgaatgtagcgtgtaagcttgtgtttcttgggcagtctttcttgaaattgaagaggtgaaatgggggtggggagtgggaggaaaggtgacttcctctggtgtttattataaagcttaaattttatatcattttaaaatgtcttggtcttctactgccttgaaaaatgacaattgtgaacatgatagttaaactaccactttttttaaccattattatgcaaaatttagaagaaaagttattggcatggttgttgcatatagttaaactgagagtaattcatctgtgaatctgctttaattacctggtgagtaacttagaaaagtggtgtaaacttgtacatggaattttttgaatatgccttaatttagaaactgaaaaatatctggttatatcattctgggtgtgttcttactgacaccaggggtccgctgccccatgtgtcctggtgagaaaatatatgcctggcacagcttttgtatagaaaattcttgagaagtaactgtccgctagaagtctgtccaaatttaaaatgtgtgccatattctggttcttgaaaataagattccagagctctttgatcgcttttaataaactgcaagttcattttaaatgaagggccagcatatatacttgcaagataattttcagctgcaaggattcagcaccagttatgtttgaatgaaccctccttttctctgagattctggtccctggaaatccctttctgctagtggtgagcatgtaagtgttaagtttttaatctgggagcagggcataggaagaaaatgtcagtagtgctaatgcattttgcactagaacgcttcgggaaaatattcatgcttgccatctgttcatttctaaatttatattcataaagttacagtttgatacaggaattattaggagtaattcttttctgtttctgtttataatgaagaacactgtagctacattttcagaagttaacatcaagccatcaaacctgggtatagtgcagaaaacgtggcacacactgaccacacattaggctgtgtcaccattgtgtggtgtacctgctggaagaattctagcatgctacttggggacataatttcagtgggaaatatgccactgaccgattttttttttttcctctttgcagtggggctaggacagttgattcaacaaagtatttttttcttttttctcagtcctaatttgaacaggtcaaagatgtgttcaggcattccaggtaacaggtgtgtatgtaaagttaaaaataggctttttaggaactcactctttagatatttacatccagcttctcatgttaaatatttgtccttaaagggtttgagatgtacatctttcatttcgtatttctcataggctatgccatgtgcggaattcaagttaccaatgtaacactggccagcgggcccagcaatctccatgtgtacttattacagtcttatttaaccaggggtcctaaccactaacattgtgactttgctttgagacctttcctctcctgggtactgaggtgctatgaagccaactgacaaagatgcatcacgtgtcttaggctgatgccactacccgatttgtttatttgcaatttgagccatttaaagaccaataaacttcctttttt

SEQ ID NO: 132 - DNA, 764 bp, Homo sapiens
attctctccttcagcataaaagctgatccacaaacaagaggagcaccagacctcctcttggcttcgagatggcttcgccacaccaagagcccaaacctggagacctgattgagattttccgccttggctatgagcactgggccctgtatataggagatggctacgtgatccatctggctcctccaagtgagtaccccggggctggctcctccagtgtcttctcagtcctgagcaacagtgcagaggtgaaacgggagcgcctggaagatgtggtgggaggctgttgctatcgggtcaacaacagcttggaccatgagtaccaaccacggcccgtggaggtgatcatcagttctgcgaaggagatggttggtcagaagatgaagtacagtattgtgagcaggaactgtgagcactttgtcacccagctgagatatggcaagtcccgctgtaaacaggtggaaaaggccaaggttgaagttggtgtggccacggcgcttggaatcctggttgttgctggatgctcttttgcgattaggagataccaaaaaaaagcgacagcctgaagcagccacaaaatcctgtgttagaagcagctgtgggggtcccagtggagatgagcctcccccatgcctccagcagcctgaccctcgtgccctgtctcaggcgttctctagatcctttcctctgtttccctctctcgctggcaaaagtatgatctaattgaaacaagactgaaggatcaataaacagccatctgccccttc

SEQ ID NO: 133 - DNA, 3663 bp, Homo sapiens
ggcggcggcggcggcgcggactgggtgcgcggcgcagcgtcctgtgttggaatgtgcggctgccgcgagctcgcggcgcagcagcggagcgagcgccgccgaggcccggggccccagaccctggcggcggctgccgcagccgagacggcagggcgaggcccggaggcctgagcaccctctgcagccccactcctgggccttcttggtccacgacggccccagcacccaactttaccaccctcccccacctctcccccgaaactccagcaacaaagaaaagtagtcggagaaggagcggcgactcagggtcgcccgcccctcctcaccgaggaaggccgaatacagttatggccacccaggtaatggggcagtcttctggaggaggagggctgtttaccagcagtggcaacattggaatggccctgcctaacgacatgtatgacttgcatgacctttccaaagctgaactggccgcacctcagcttattatgctggcaaatgtggccttaactggggaagtaaatggcagctgctgtgattacctggtcggtgaagaaagacagatggcagaactgatgccggttggggataacaacttttcagatagtgaagaaggagaaggacttgaagagtctgctgatataaaaggtgaacctcatggactggaaaacatggaactgagaagtttggaactcagcgtcgtagaacctcagcctgtatttgaggcatcaggtgctccagatatttacagttcaaataaagatcttccccctgaaacacctggagcggaggacaaaggcaagagctcgaagaccaaaccctttcgctgtaagccatgccaatatgaagcagaatctgaagaacagtttgtgcatcacatcagagttcacagtgctaagaaattttttgtggaagagagtgcagagaagcaggcaaaagccagggaatctggctcttccactgcagaagagggagatttctccaagggccccattcgctgtgaccgctgcggctacaatactaatcgatatgatcactatacagcacacctgaaacaccacaccagagctggggataatgagcgagtctacaagtgtatcatttgcacatacacaacagtgagcgagtatcactggaggaaacatttaagaaaccattttccaaggaaagtatacacatgtggaaaatgcaactatttttcagacagaaaaaacaattatgttcagcatgttagaactcatacaggagaacgcccatataaatgtgaactttgtccttactcaagttctcagaagactcatctaactagacatatgcgtactcattcaggtgagaagccatttaaatgtgatcagtgcagttatgtggcctctaatcaacatgaagtaacccgccatgcaagacaggttcacaatgggcctaaacctcttaattgcccacactgtgattacaaaacagcagatagaagcaacttcaaaaaacatgtagagctacatgtgaacccacggcagttcaattgccctgtatgtgactatgcagcttccaagaagtgtaatctacagtatcacttcaaatctaagcatcctacttgtcctaataaaacaatggatgtctcaaaagtgaaactaaagaaaaccaaaaaacgagaggctgacttgcctgataatattaccaatgaaaaaacagaaatagaacaaacaaaaataaaaggggatgtggctggaaagaaaaatgaaaagtccgtcaaagcagagaaaagagatgtctcaaaagagaaaaagccttctaataatgtgtcagtgatccaggtgactaccagaactcgaaaatcagtaacagaggtgaaagagatggatgtgcatacaggaagcaattcagaaaaattcagtaaaactaagaaaagcaaaaggaagctggaagttgacagccattctttacatggtcctgtgaatgatgaggaatcttcaacaaaaaagaaaaagaaggtagaaagcaaatccaaaaataatagtcaggaagtgccaaagggtgacagcaaagtggaggagaataaaaagcaaaatacttgcatgaaaaaaagtacaaagaagaaaactctgaaaaataaatcaagtaagaaaagcagtaagcctcctcagaaggaacctgttgagaagggatctgctcagatggaccctcctcagatggggcctgctcccacagaggcggttcagaaggggcccgttcaggtggagccgccacctcccatggagcatgctcagatggagggtgcccagatacggcctgctcctgacgagcctgttcagatggaggtggttcaggaggggcctgctcagaaggagctgctgcctcccgtggagcctgctcagatggtgggtgcccaaattgtacttgctcacatggagctgcctcctcccatggagactgctcagacggaggttgcccaaatggggcctgctcccatggaacctgctcagatggaggttgcccaggtagaatctgctcccatgcaggtggtccagaaggagcctgttcagatggagctgtctcctcccatggaggtggtccagaaggagcctgttcagatagagctgtctcctcccatggaggtggtccagaaggaacctgttaagatagagctgtctcctcccatagaggtggtccagaaggagcctgttcagatggagttgtctcctcccatgggggtggttcagaaggagcctgctcagagggagccacctcctcccagagagcctccccttcacatggagccaatttccaaaaagcctcctctccgaaaagataaaaaggaaaagtctaacatgcagagtgaaagggcacggaaggagcaagtccttattgaagttggcttagtgcctgttaaagatagctggcttctaaaggaaagtgtaagcacagaggatctctcaccaccatcaccaccactgccaaaggaaaatttaagagaagaggcatcaggagaccaaaaattactcaacacaggtgaaggaaataaagaagcccctcttcagaaagtaggagcagaagaggcagatgagagcctacctggtcttgctgctaatatcaacgaatctacccatatttcatcctctggacaaaacttgaatacgccagagggtgaaactttaaatggtaaacatcagactgacagtatagtttgtgaaatgaaaatggacactgatcagaacacaagagagaatctcactggtataaattcaacagttgaagaaccagtttcaccaatgcttcccccttcagcagtagaagaacgtgaagcagtgtccaaaactgcactggcatcacctcctgctacaatggcagcaaatgagtctcaggaaattgatgaagatgaaggcatccacagccatgaaggaagtgacctaagtgacaacatgtcagagggtagtgatgattctggattgcatggggctcggccagttccacaagaatctagcagaaaaaatgcaaaggaagccttggcagtcaaagcggctaagggagattttgtttgtatcttctgtgatcgttctttcagaaagggaaaagattacagcaaacacctcaatcgccatttggttaatgtgtactatcttgaagaagcagctcaagggcaggagtaatgaaactttgaacaaggtttca

SEQ ID NO: 134 - DNA, 985 bp, Homo sapiens
gtctgcaggtatggatgttgttctcttttccctgtctttatttccttaccaatcggctgccatccgaggagctgaggaagcctagagctctcagaagcagtcctttgagctggtgtaggggcactcagaatggtccagcgtttgacataccgacgtaggctttcctacaatacagcctctaacaaaactaggctgtcccgaacccctggtaatagaattgtttacctttataccaagaaggttgggaaagcaccaaaatctgcatgtggtgtgtgcccaggcagacttcgaggggttcgtgctgtaagacctaaagttcttatgagattgtccaaaacaaagaaacatgtcagcagggcctatggtggttccatgtgtgctaaatgtgttcgtgacaggatcaagcgtgctttccttatcgaggagcagaaaatcgttgtgaaagtgttgaaggcacaagcacagagtcagaaagctaaataaaaaaatgaaacttttttgagtaataaaaatgaaaagacgctgtccaatagaaaaagttggtgtgctggagctacctcacctcagcttgagagagccagttgtgtgcatctctttccagttttgcatccagtgacgtctgcttggcatcttgagattgttatggtgagagtatttacacctcagcaaatgctgcaaaatcctgttttcccccagagagctggaggttaaatactaccagcacatccctagatactactcaagttacagtatatgatcactaatatagtatgctcttggtaccaggagctctgatatatatctggtacatgtttgataatgacttgattgttattataagtacttattaatacttcgattctgtaaagagtttagggtttgattttataaaatccaaaatgagccttttattgaatccagttctctatgtgaccagttctctgtatgaatggaagggaaaagaattaaaaatcttgcaaagggg

SEQ ID NO: 135 - DNA, 1127 bp, Homo sapiens
gattgcttatagaccggaagccgggaccttaattctctttcccatcttgcaaggtaagaatcgcgggcctgtctgcaagacttgagttcaggactcccaatccttcgccatccgaacctggagggcatccagtcgacacctacaggggtcggacatgtccaaggctaactgagaggccttccagacgcttcatttttgttgtttgggtttgcggcagggcacaaagaggatggcgggtgaaaaagttgagaagccagatactaaagagaagaaacccgaagccaagaaggttgatgctggtggcaaggtgaaaaagggtaacctcaaagctaaaaagcccaagaaggggaagccccattgcagccgcaaccctgtccttgtcagaggaattggcaggtattcccgatctgccatgtattccagaaaggccatgtacaagaggaagtactcagccgctaaatccaaggttgaaaagaaaaagaaggagaaggttctcgcaactgttacaaaaccagttggtggtgacaagaacggcggtacccgggtggttaaacttcgcaaaatgcctagatattatcctactgaagatgtgcctcgaaagctgttgagccacggcaaaaaacccttcagtcagcacgtgagaaaactgcgagccagcattacccccgggaccattctgatcatcctcactggacgccacaggggcaagagggtggttttcctgaagcagctggctagtggcttattacttgtgactggacctctggtcctcaatcgagttcctctacgaagaacacaccagaaatttgtcattgccacttcaaccaaaatcgatatcagcaatgtaaaaatcccaaaacatcttactgatgcttacttcaagaagaagaagctgcggaagcccagacaccaggaaggtgagatcttcgacacagaaaaagagaaatatgagattacggagcagcgcaagattgatcagaaagctgtggactcacaaattttaccaaaaatcaaagctattcctcagctccagggctacctgcgatctgtgtttgctctgacgaatggaatttatcctcacaaattggtgttctaaatgtcttaagaacctaattaaatagctgact

SEQ ID NO: 136 - DNA, 1054 bp, Homo sapiens
aagtaattcctagacccgtaggtggccgcagagccggttacctctggttctgcgccagcgtgccccacccgcaggacggccgggttctttgatttgtacactttctaaaaccaaacccgagaggaagggcaggctcagggtggggatgccctgaaatattcgagagcaggaccgtttctactgaagagaagtttacaagaacgctctgtctggggcgggcgaggcctctgcgaggcgggtccgggagcgagggcagggcgtgggccgcgcgcccggggtcgggggagtcgggggcaggaagagggggaggagacagggctgggggagcgccctgccgagcgcccgccaggctcctcccgctcccgcgccgcctccctctacccacccgccgcacgtactaaggaaggcgcacagcccgccgcgctcgcctctccgccccgcgtccagctcgcccagctcgcccagcgtccgccgcgcctcggccaaggcttcaacggaccacaccaaaatgccatctcaaatggaacacgccatggaaaccatgatgtttacatttcacaaattcgctggggataaaggctacttaacaaaggaggacctgagagtactcatggaaaaggagttccctggatttttggaaaatcaaaaagaccctctggctgtggacaaaataatgaaggacctggaccagtgtagagatggcaaagtgggcttccagagcttcttttccctaattgcgggcctcaccattgcatgcaatgactattttgtagtacacatgaagcagaagggaaagaagtaggcagaaatgagcagttcgctcctccctgataagagttgtcccaaagggtcgcttaaggaatctgccccacagcttcccccatagaaggatttcatgagcagatcaggacacttagcaaatgtaaaaataaaatctaactctcatttgacaagcagagaaagaaaagttaaataccagataagcttttgatttttgtattgtttgcatccccttgccctcaataaataaagttcttttttagttccaaatttg

SEQ ID NO: 137 - DNA, 510 bp, Homo sapiens
tgaggctgccttataaagcaccaagaggctgccagtgggacattttctcggccctgccagcccccaggaggaaggtgggtctgaatctagcaccatgacggaactagagacagccatgggcatgatcatagacgtcttttcccgatattcgggcagcgagggcagcacgcagaccctgaccaagggggagctcaaggtgctgatggagaaggagctaccaggcttcctgcagagtggaaaagacaaggatgccgtggataaattgctcaaggacctggatgccaatggagatgcccaggtggacttcagtgagttcatagtgttcgtggctgcaatcacgtctgcctgtcacaagtactttgagaaggcaggactcaaatgatgccctggagatgtcacagattcctggcagagccatggtcccaggcttcccaaaagtgtttgttggcaattattcccctaggctgagcctgctcatgtacctctgattaataaatgcttatgaaatga

SEQ ID NO: 138 - DNA, 2671 bp, Homo sapiens
acgcgcctgtgttgccgcccgcggccctggcttcgggcttcagggagctctggtgcagtctccgcctgtcagtgccggcagtcgtccgcggcgcccgccccggtcccgcactggtgcagccatgtcctcttccccgtgggagcctgcgaccctgcgccgggtgttcgtggtgggggttggcatgaccaagtttgtgaagcctggagctgagaattcaagagactaccctgacttggcagaagaagcaggcaagaaggctttagctgatgcacagatcccttattcagcagtggaccaggcatgtgttggctatgtttttggtgactctacctgtgggcagagggctatctatcacagtttgggaatgactggaattcctataatcaatgtcaacaataactgtgctactggttctactgctttgtttatggcccgccagctgattcagggtggtgtggcagaatgtgtcttggctcttgggtttgagaagatgagtaagggaagccttggaataaaattttcagatagaaccattcccactgataagcatgttgacctcctgatcaataagtatggattgtctgctcacccagttgctcctcagatgtttgggtatgctggaaaagaacatatggaaaaatatggaacaaaaattgaacactttgcaaaaattggatggaaaaatcataaacattcagttaataacccgtattcccagttccaagatgaatacagtttagatgaagtgatggcatctaaagaagtttttgattttttgactatcttacaatgttgtcccacttcagatggtgctgcagcagcaattttggccagtgaagcatttgtacagaagtatggcctgcaatccaaagctgtggaaattttggcacaagaaatgatgactgatttgccaagctcgtttgaagaaaaaagcattattaaaatggttggctttgatatgagtaaagaagctgcaagaaaatgctatgagaaatctggcctgacaccaaatgatattgacgtaatagaacttcacgattgcttttctaccaacgaactccttacttatgaagcactgggactctgtccagaaggacaaggtgcaacgctggttgatagaggagataatacatatggaggaaagtgggtcataaatcctagtggtggactgatttcaaagggacacccactaggcgctacaggtcttgctcagtgtgcagaactctgctggcagctgagaggggaagccggaaagaggcaagttcctggtgcaaaggtggctctgcagcataatttaggcattggaggagctgtggttgtaacactctacaagatgggttttccggaagccgccagttcttttagaactcatcaaattgaagctgttccaaccagctctgcaagtgatggatttaaggcaaatcttgtttttaaggagattgagaagaaacttgaagaggaaggggaacagtttgtgaagaaaatcggtggtatttttgccttcaaggtgaaagatggccctgggggtaaagaggccacctgggtggtggatgtgaagaatggcaaaggatcagtgcttcctaactcagataagaaggctgactgcacaatcacaatggctgactcagacttcctggctttaatgactggtaaaatgaatcctcagtcggccttctttcaaggcaaattgaaaatcactggcaacatgggtctcgctatgaagttacaaaatcttcagcttcagccaggcaacgctaagctctgaagaactccctttggctacttttgaaaatcaagatgagatatatagatatatatccatacattttattgtcagaatttagactgaaactacacattggcaaatagcgtgggatagatttgtttcttaatgggtgtgaccaatcctgtttttcctatgctctgggtgaatagagcctgatggtatactactgctttgcggaattgcatacaactgtgcattacaaagttaatatggtaattatggtctggggtaaaattgagtttcagaataaaattaggaacagtaaaatccaaagaactatgtaaacaaaaaagcttttgttttgcttacaaagtatatttaaggattattctgctgaagattcagtttaagagttttccttgggagaactaagtaagaaacacaatgccaacagctggccagtaattagtgttgtgcacttcatgtcattaatcaatttctcaatagttcttaaaattagtgagattaaaaatctaaaaattttgcatttcatgctatcagaaacagtattttcttcccaaatcaaaataaaagaaatatgatcagagcttgaacacaggcttatttttaaaataaaaatatttttaacatgggtttccttattgaaaaatcagtgtattagtcataaaacaccatcattaagaataattgaacaataaagtttgctttcagatgcagttttcaaattataatctcatttcaatttataacgttctcagtcctttgttataattttcctttttcatgtaagtttaattatctgcatttatcttttttcctagtttttctaatactaatgttatttcttaaaattcagtgagatataggataaaataatgctttgagaagaatgtttaatagaaaattaaaataactttttctggc

SEQ ID NO: 139 - DNA, 4274 bp, Homo sapiens
cggaagtgttgggcgcagggcgtggctgcggctgcggctgccacgttggaacggaacgtggaggtggccctggccggggaggaggggcggcggcgaatgctgggagagtccgacgagcgctgcactaacgcaggatccggctgccgaaggtcctcgccagcaggatgaagttaaaggaagtagatcgtacagccatgcaggcatggagccctgcccagaatcaccccatttacctagcaacaggaacatctgctcagcaattggatgcaacatttagtacgaatgcttcccttgagatatttgaattagacctctctgatccatccttggatatgaaatcttgtgccacattctcctcttctcacaggtaccacaagttgatttgggggccttataaaatggattccaaaggagatgtctctggagttctgattgcaggtggtgaaaatggaaatattattctctatgatccttctaaaattatagctggagacaaggaagttgtgattgcccagaatgacaagcatactggcccagtgagagccttggatgtgaacattttccagactaatctggtagcttctggtgctaatgaatctgaaatctacatatgggatctaaataattttgcaaccccaatgacaccaggagccaaaacacagccgccagaagatatcagctgcattgcatggaacagacaagttcagcatattttagcatcagccagtcccagtggccgggccactgtatgggatcttagaaaaaatgagccaatcatcaaagtcagtgaccatagtaacagaatgcattgttctgggttggcatggcatcctgatgttgctactcagatggtccttgcctccgaggatgaccggttaccagtgatccagatgtgggatcttcgatttgcttcctctccacttcgtgtcctggaaaaccatgccagggggattttggcaattgcttggagcatggcagatcctgaattgttactgagctgtggaaaagatgctaagattctctgctccaatccaaacacaggagaggtgttatatgaacttcccaccaacacacagtggtgcttcgatattcagtggtgtccccgaaatcctgctgtcttatcagctgcttcgtttgatgggcgtatcagtgtttattctatcatgggaggtagcacagatggtttaagacagaaacaagttgacaagctttcatcatcttttgggaatcttgatccctttggcacaggacagccccttcctccgttacaaattccacagcagactgctcagcatagtatagtgctgcctctgaagaagccgcccaagtggattcgaaggcctgttggtgcttctttttcatttggaggcaaactggttacgtttgagaatgtcagaatgccttctcatcagggagctgagcagcagcagcagcagcaccatgtgttcattagtcaggttgtaacagaaaaggagttcctcagccgatcagaccaacttcagcaggctgtgcagtcacaaggatttatcaattattgccaaaaaaaaattgatgcttctcagactgaatttgagaaaaatgtgtggtcctttttgaaggtaaactttgaggatgattctcgtggaaaataccttgaacttctaggatacagaaaagaagatctaggaaagaagattgctttggccttgaacaaagtggatggagccaatgtggctcttaaagactctgaccaagtagcacagagtgatggggaggagagccctgctgctgaagagcagctcttgggagagcacattaaagaggaaaaagaagaatctgaatttctaccctcatctggaggaacatttaatatctctgtcagtggggacattgatggtttaattactcaggctttgctgacgggcaattttgagagtgctgttgacctttgtttacatgataaccgcatggccgatgccattatattggccatagcaggtggacaagaactcttggctcgaacccagaaaaaatacttcgcaaaatcccaaagcaaaattaccaggctcatcactgcagtggtgatgaagaactggaaagagattgttgagtcttgtgatcttaaaaattggagagaggctttagctgcagtattgacttatgcaaagccggatgaattttcagccctttgtgatcttttgggaaccaggcttgaaaatgaaggagatagcctcctgcagactcaagcatgtctctgctatatttgtgcagggaatgtagagaaattagttgcatgttggactaaagctcaagatggaagccaccctttgtcacttcaggatctgattgagaaagttgtcatcctgcgaaaagctgtgcaactcactcaagccatggacactagtactgtaggagttctcttggctgcgaagatgagtcagtatgccaatttgttggcagctcagggcagtattgctgcagccttggcttttcttcctgacaacaccaaccagccaaatatcatgcagcttcgtgacagactttgtagagcacaaggagagcctgtagcaggacatgaatcacctaaaattccgtacgagaaacagcagctccccaagggcaggcctggaccagttgctggccaccaccagatgccaagagttcaaactcaacaatattatccccatggagaaaatcctccacctccgggtttcataatgcatggaaatgttaatccaaatgctgctggtcagcttcccacatctccaggtcatatgcacacccaggtaccaccttatccacagccacagccttatcaaccagcccagccgtatcccttcggaacaggggggtcagcaatgtatcgacctcagcagcctgttgctcctcctacttcaaacgcttaccctaacaccccttacatatcttctgcttcttcctatactgggcagtctcagctgtacgcagcacagcaccaggcctcttcacctacctccagccctgctacttctttccctcctcccccttcctctggagcatccttccagcatggcggaccaggagctccaccatcatcttcagcttatgcactgcctcctggaacaacaggtacactgcctgctgccagtgagctgcctgcgtcccaaagaacagaaaaccagtctatccaagaccaggcacctatgttggaaggtcctcagaatggttggaatgaccctccagctttgaacagagtacccaaaaagaagaagatgcctgaaaacttcatgcctcctgttcccatcacatcaccaatcatgaacccgttgggtgacccccagtcacaaatgctgcagcaacagccttcagctccagtaccactgtcaagccagtcttcattcccacagccacatcttccaggtggccagcccttccatggcgtacagcaacctcttggtcaaacaggcatgccaccatttcaaagcccaatattgaaggtgccccaggggctcctattggaaataccttccagcatgtgcagtctttgccaacaaaaaaaattaccaagaaacctattccagatgagcacctcattctaaagaccacatttgaggatcttattcagcgctgcctttcttcagcaacagaccctcaaaccaagaggaagctagatgatgccagcaaacgtttggagtttctgtatgataaacttagggaacagacactttcaccaacaatcaccagtggtttacacaacattgcaaggagcattgaaactcgaaactactcagaaggattgaccatgcatacccacatagttagcaccagcaacttcagtgagacctctgctttcatgccagttctcaaagttgttctcacccaggccaataagctgggtgtctaaaaggacagcttctcttccactcaatattgccatttttccaaagaaacatgttaaaaaaaaaaattataagacatggactagtcctcattagcatgtttgcatagcaaccagtcaagagcatttacactatttctgctgatatactcaccttagaactgctcagaaccctggtgctttatttttgttttaatcttttgttgccagtgatgattttcctattctgcaaatagtgtatttcctggattacacatagtatggtttcctgaagtattctgataaatgtgttttttaaaacctcaatatactttttagaaaaggagcatctggttatgcataaagcagagctaaaactaaatttctttcatgtcctccctacttcctcagtgtcaatcagattaaagtgtgtaatcct

SEQ ID NO: 140 - DNA, 3551 bp, Homo sapiens
ggcagagaggccgcggagggctggcgggcgagcgcgggcaggcggcgacgcgggggcaggggtggacggcggtcagagccgaacgcgagggcggcgcccggggactggagctgcgcgcaataggacagctggcctgaagctcagagccggggcgtgcgccatggccccacactgggctgtctggctgctggcagcaaggctgtggggcctgggcattggggctgaggtgtggtggaaccttgtgccgcgtaagacagtgtcttctggggagctggccacggtagtacggcggttctcccagaccggcatccaggacttcctgacactgacgctgacggagcccactgggcttctgtacgtgggcgcccgagaggccctgtttgccttcagcatggaggccctggagctgcaaggagcgatctcctgggaggcccccgtggagaagaagactgagtgtatccagaaagggaagaacaaccagaccgagtgcttcaacttcatccgcttcctgcagccctacaatgcctcccacctgtacgtctgtggcacctacgccttccagcccaagtgcacctacgtcaacatgctcaccttcactttggagcatggagagtttgaagatgggaagggcaagtgtccctatgacccagctaagggccatgctggccttcttgtggatggtgagctgtactcggccacactcaacaacttcctgggcacggaacccattatcctgcgtaacatggggccccaccactccatgaagacagagtacctggccttttggctcaacgaacctcactttgtaggctctgcctatgtacctgagagtgtgggcagcttcacgggggacgacgacaaggtctacttcttcttcagggagcgggcagtggagtccgactgctatgccgagcaggtggtggctcgtgtggcccgtgtctgcaagggcgatatggggggcgcacggaccctgcagaggaagtggaccacgttcctgaaggcgcggctggcatgctctgccccgaactggcagctctacttcaaccagctgcaggcgatgcacaccctgcaggacacctcctggcacaacaccaccttctttggggtttttcaagcacagtggggtgacatgtacctgtcggccatctgtgagtaccagttggaagagatccagcgggtgtttgagggcccctataaggagtaccatgaggaagcccagaagtgggaccgctacactgaccctgtacccagccctcggcctggctcgtgcattaacaactggcatcggcgccacggctacaccagctccctggagctacccgacaacatcctcaacttcgtcaagaagcacccgctgatggaggagcaggtggggcctcggtggagccgccccctgctcgtgaagaagggcaccaacttcacccacctggtggccgaccgggttacaggacttgatggagccacctatacagtgctgttcattggcacaggagacggctggctgctcaaggctgtgagcctggggccctgggttcacctgattgaggagctgcagctgtttgaccaggagcccatgagaagcctggtgctatctcagagcaagaagctgctctttgccggctcccgctctcagctggtgcagctgcccgtggccgactgcatgaagtatcgctcctgtgcagactgtgtcctcgcccgggacccctattgcgcctggagcgtcaacaccagccgctgtgtggccgtgggtggccactctggatctctactgatccagcatgtgatgacctcggacacttcaggcatctgcaacctccgtggcagtaagaaagtcaggcccactcccaaaaacatcacggtggtggcgggcacagacctggtgctgccctgccacctctcctccaacttggcccatgcccgctggacctttgggggccgggacctgcctgcggaacagcccgggtccttcctctacgatgcccggctccaggccctggttgtgatggctgcccagccccgccatgccggggcctaccactgcttttcagaggagcagggggcgcggctggctgctgaaggctaccttgtggctgtcgtggcaggcccgtcggtgaccttggaggcccgggcccccctggaaaacctggggctggtgtggctggcggtggtggccctgggggctgtgtgcctggtgctgctgctgctggtgctgtcattgcgccggcggctgcgggaagagctggagaaaggggccaaggctactgagaggaccttggtgtaccccctggagctgcccaaggagcccaccagtccccccttccggccctgtcctgaaccagatgagaaactttgggatcctgtcggttactactattcagatggctcccttaagatagtacctgggcatgcccggtgccagcccggtggggggcccccttcgccacctccaggcatcccaggccagcctctgccttctccaactcggcttcacctggggggtgggcggaactcaaatgccaatggttacgtgcgcttacaactaggaggggaggaccggggagggctcgggcaccccctgcctgagctcgcggatgaactgagacgcaaactgcagcaacgccagccactgcccgactccaaccccgaggagtcatcagtatgaggggaacccccaccgcgtcggcgggaagcgtgggaggtgtagctcctacttttgcacaggcaccagctacctcagggacatggcacgggcacctgctctgtctgggacagatactgcccagcacccacccggccatgaggacctgctctgctcagcacgggcactgccacttggtgtggctcaccagggcaccagcctcgcagaaggcatcttcctcctctctgtgaatcacagacacgcgggaccccagccgccaaaacttttcaaggcagaagtttcaagatgtgtgtttgtctgtatttgcacatgtgtttgtgtgtgtgtgtatgtgtgtgtgcacgcgcgtgcgcgcttgtggcatagccttcctgtttctgtcaagtcttcccttggcctgggtcctcctggtgagtcattggagctatgaaggggaaggggtcgtatcactttgtctctcctacccccactgccccgagtgtcgggcagcgatgtacatatggaggtggggtggacagggtgctgtgccccttcagagggagtgcagggcttggggtgggcctagtcctgctcctagggctgtgaatgttttcagggtggggggagggagatggagcctcctgtgtgtttggggggaagggtgggtggggcctcccacttggccccggggttcagtggtattttatacttgccttcttcctgtacagggctgggaaaggctgtgtgaggggagagaagggagagggtgggcctgctgtggacaatggcatactctcttccagccctaggaggagggctcctaacagtgtaacttattgtgtccccgcgtatttatttgttgtaaatatttgagtatttttatattgacaaataaaatggagaaaatgaaacg

SEQ ID NO: 141 - DNA, 3176 bp, Homo sapiens
aggagcacagctgtgtttggctgcagggccaagagcgctgtcaagaagacccacacgcccccctccagcagctgaattcctgcagctcagcagccgccgccagagcaggacgaaccgccaatcgcaaggcacctctgagaacttcaggatgcagatgtctccagccctcacctgcctagtcctgggcctggcccttgtctttggtgaagggtctgctgtgcaccatcccccatcctacgtggcccacctggcctcagacttcggggtgagggtgtttcagcaggtggcgcaggcctccaaggaccgcaacgtggttttctcaccctatggggtggcctcggtgttggccatgctccagctgacaacaggaggagaaacccagcagcagattcaagcagctatgggattcaagattgatgacaagggcatggcccccgccctccggcatctgtacaaggagctcatggggccatggaacaaggatgagatcagcaccacagacgcgatcttcgtccagcgggatctgaagctggtccagggcttcatgccccacttcttcaggctgttccggagcacggtcaagcaagtggacttttcagaggtggagagagccagattcatcatcaatgactgggtgaagacacacacaaaaggtatgatcagcaacttgcttgggaaaggagccgtggaccagctgacacggctggtgctggtgaatgccctctacttcaacggccagtggaagactcccttccccgactccagcacccaccgccgcctcttccacaaatcagacggcagcactgtctctgtgcccatgatggctcagaccaacaagttcaactatactgagttcaccacgcccgatggccattactacgacatcctggaactgccctaccacggggacaccctcagcatgttcattgctgccccttatgaaaaagaggtgcctctctctgccctcaccaacattctgagtgcccagctcatcagccactggaaaggcaacatgaccaggctgccccgcctcctggttctgcccaagttctccctggagactgaagtcgacctcaggaagcccctagagaacctgggaatgaccgacatgttcagacagtttcaggctgacttcacgagtctttcagaccaagagcctctccacgtcgcgcaggcgctgcagaaagtgaagatcgaggtgaacgagagtggcacggtggcctcctcatccacagctgtcatagtctcagcccgcatggcccccgaggagatcatcatggacagacccttcctctttgtggtccggcacaaccccacaggaacagtccttttcatgggccaagtgatggaaccctgaccctggggaaagacgccttcatctgggacaaaactggagatgcatcgggaaagaagaaactccgaagaaaagaattttagtgttaatgactctttctgaaggaagagaagacatttgccttttgttaaaagatggtaaaccagatctgtctccaagaccttggcctctccttggaggacctttaggtcaaactccctagtctccacctgagaccctgggagagaagtttgaagcacaactcccttaaggtctccaaaccagacggtgacgcctgcgggaccatctggggcacctgcttccacccgtctctctgcccactcgggtctgcagacctggttcccactgaggccctttgcaggatggaactacggggcttacaggagcttttgtgtgcctggtagaaactatttctgttccagtcacattgccatcactcttgtactgcctgccaccgcggaggaggctggtgacaggccaaaggccagtggaagaaacaccctttcatctcagagtccactgtggcactggccacccctccccagtacaggggtgctgcaggtggcagagtgaatgtcccccatcatgtggcccaactctcctggcctggccatctccctccccagaaacagtgtgcatgggttattttggagtgtaggtgacttgtttactcattgaagcagatttctgcttccttttatttttataggaatagaggaagaaatgtcagatgcgtgcccagctcttcaccccccaatctcttggtggggaggggtgtacctaaatatttatcatatccttgcccttgagtgcttgttagagagaaagagaactactaaggaaaataatattatttaaactcgctcctagtgtttctttgtggtctgtgtcaccgtatctcaggaagtccagccacttgactggcacacacccctccggacatccagcgtgacggagcccacactgccaccttgtggccgcctgagaccctcgcgccccccgcgcccctctttttccccttgatggaaattgaccatacaatttcatcctccttcaggggatcaaaaggacggagtggggggacagagactcagatgaggacagagtggtttccaatgtgttcaatagatttaggagcagaaatgcaaggggctgcatgacctaccaggacagaactttccccaattacagggtgactcacagccgcattggtgactcacttcaatgtgtcatttccggctgctgtgtgtgagcagtggacacgtgaggggggggtgggtgagagagacaggcagctcggattcaactaccttagataatatttctgaaaacctaccagccagagggtagggcacaaagatggatgtaatgcactttgggaggccaaggcgggaggattgcttgagcccaggagttcaagaccagcctgggcaacataccaagacccccgtctctttaaaaatatatatattttaaatatacttaaatatatatttctaatatctttaaatatatatatatattttaaagaccaatttatgggagaattgcacacagatgtgaaatgaatgtaatctaatagaagcctaatcagcccaccatgttctccactgaaaaatcctctttctttggggtttttctttctttcttttttgattttgcactggacggtgacgtcagccatgtacaggatccacaggggtggtgtcaaatgctattgaaattgtgttgaattgtatgctttttcacttttgataaataaacatgtaaaaatgtttcaaaaaaataataaaataaataaatacgaagaatatgtcaggac

SEQ ID NO: 142 - DNA, 5016 bp, Homo sapiens
aataaagaaataaaacaggtgtctgaggagaggttctattagagaggggagaatagagagtaattatcgttcagacaggcaagagttctctgcaggtagcagcctgggaaagcgaactcgcgcaccctcttgggggacgggctcttttgctttctatttcttctcctgcagccagggtgcacacgtatttgaaacagaccgaatttcctcctcgatgtggcgtcaggttgacttttcgagactagcgggtatttctttttaatgactccaatgcctttttattattgctgttattgaggttgagggagaagagatcggtctaaattctggctgggtaagtggggggattctcggcgatgagaaacgggggacttagaagccggaggaaaatcagcagccccacatctccacttctccagtccgccctactctccacccgtgacctccagtggagaccccaggcggcagcatcagtatttgatcggcccttcgtcagcacgctgccagccctggccggctgggttcgccaggcatcacccgctcggctctgaagcggacgcctggccctgcaccgggctttggaaggaccctctctgcgctcgccccctccccagggtggctccgctttcgagcccgggcgcggtgcccaccatgcgcggctgcctgcggctcgcgctgctctgcgcgctgccctggctcctgctggcggcgtcgcccgggcacccggcgaaatcccccaggcagcccccggcaccgcgccgcgaccccttcgacgctgccaggggcgccgatttcgatcatgtctacagcggggtggtgaacctcagcaccgagaacatctactctttcaactacaccagccagcccgaccaggtgacagccgtgagggtgtatgtgaacagttcctctgagaatctcaactacccggtccttgttgtggttcgccagcagaaagaggtgctgtcctggcaggttcctctgctcttccaaggactataccagaggagctacaactatcaagaagtgagccgcaccttatgtccctcagaagcaaccaatgagacgggacccttgcagcaactgatatttgtagatgtcgcatccatggcacccctgggtgctcagtacaaactgctagttaccaagctgaagcacttccagctccggacaaatgttgcctttcactttactgccagcccctctcaacctcagtattttctatacaagtttcccaaagacgtggactcagttatcattaaagtggtgtctgaaatggcttatccatgttctgttgtctcagtccagaatatcatgtgcccggtgtatgatctcgaccacaatgtggaatttaatggtgtctatcagtccatgaccaagaaagctgccatcacgctacagaagaaggattttccaggcgagcagttcttcgtggtatttgtgataaagcctgaagattatgcctgtggaggatctttcttcatccaggaaaaggaaaaccagacctggaatctacagcgaaaaaagaaccttgaagtgaccattgtcccttccattaaagaatctgtttatgtgaaatccagtcttttcagtgtcttcatcttcctgtccttctacttgggatgccttcttgttgggtttgttcattatctgaggtttcagagaaaatccattgatggaagctttgggtccaatgatggctctggaaatatggtggcatctcatcccattgctgccagcacacccgaagggagcaattatgggacaatagatgagtcaagctccagtcctggaaggcagatgtcctcctccgatggtgggccaccgggccagtcagacacagacagctccgtggaggagagcgacttcgacaccatgccagacattgagagtgataaaaacatcatccggaccaagatgttcctttacctgtcagatttgtccaggaaggaccggagaattgtcagcaaaaaatataaaatttatttttggaacatcatcaccattgctgtgttttacgcgctgcccgtgatccagctggtcattacctatcagacagtggtaaatgtcactggcaaccaggacatctgttactacaacttcctctgtgctcaccccttgggcgtcctgagtgccttcaacaacattctcagcaatctgggccacgtgcttctgggcttcctcttcctgctgatagtcttgcgccgcgacatcctccatcggagagccctggaagccaaggacatctttgctgtggagtacgggattcccaaacactttggtctcttctacgctatgggcattgcattgatgatggaaggggtgctcagtgcttgctaccatgtctgccctaattattccaacttccaattcgacacctccttcatgtacatgatcgctggcctgtgcatgctgaagctctatcagacccgccacccagacatcaatgccagcgcctactctgcctatgcctcctttgctgtggtcatcatggtcaccgtccttggagtggtgtttggaaaaaatgacgtatggttctgggtcatcttctctgcaatccacgttctggcctcgctagccctcagcacccagatatattatatgggtcgtttcaagatagatgtgtctgacacagatttgggaattttccggcgggctgccatggtgttctacacagactgtatccagcagtgtagccgacctctatatatggatagaatggtgttgctggttgtggggaatctggttaactggtccttcgccctctttggattgatataccgccccagggactttgcttcctacatgctgggcatcttcatctgtaaccttttgctgtacctggccttttacatcatcatgaagctccgcagctctgaaaaggtcctcccagtcccgctcttctgcatcgtggccaccgctgtgatgtgggctgccgccctatattttttcttccagaatctcagcagctgggagggaactccggccgaatcccgggagaagaaccgcgagtgcattctgctggatttcttcgatgaccatgacatctggcacttcctctctgctactgctctgtttttctcattcttggttttgttaactttggatgatgaccttgatgtggttcggagagaccagatccctgtcttctgaacctccaacattaagagaggggagggagcgatcaatcttggtgctgtttcacaaaaattacagtgaccacagcaaagtaaccactgccagatgctccactcaccctctgtagagccaactctgcattcacacaggaaggagaggggctgcgggagatttaaacctgcaagaaaggaggcagaaggggagccatgttttgaggacagacgcaaacctgaggagctgagaaacacttgctccttccatctgcagctttgggagtgcaacagggataggcactgcatccaagtcaactcaccatcttggggtccctcccaccctcacggagacttgccagcaatggcagaatgctgctgcacacttccctccagttgtcaccctgcccagaaaggccagcagcttggacttcctgcccagaaactgtgttggcccccttcacacctctgcaacacctgctgctccagcaagaggatgtgattctttagaatatggcggggaggtgaccccaggccctgccctactgggatagatgttttaatggcaccagctagtcacctcccagaagaaactctgtatatttcccccaggtttctgatgccatcagaagggctcaggagtggggtttgtcacacattcctcttaacaagtaactgtcactgggaccgagtcctgggtgcttacatattccttcgtgtcttcatctcactgacctgtgtggacctcatcactctgactctgccttcttggaaaggccctgtcactccacagatgtctggccagcttcaaggcagaaggaaaaacaggaaaagctcttttaacagcagcaggaacaagagaaatgactaaccatactaaaagactggtaacagcagcagcagccagacaggcctcaccttaaggacttgggctgccagagcaaattcagcagagcttatttggcctcccattcacacagctcagttctgtgcccacatcacctttggggaagaaatcagcattctaatcagggacactacttcaggagtcctccacagcgagtccgtcatctgtcactttatgtagatcagggttctagacttcttccctgaggttctcagaagcagctctcaggatgaacgtattgtcctcttcccctcttcttgcaaagtgcacagctaatctaatgttgtctctcggttgcacctgacattctctccccagtaaggtgttggcaagctcagcatctgggttccactctcacactgtctggcagctctgtgtctgagaagttctacattgaccaggcccccttgttgcctggagtatgacgtaatcagaaaatagacgtataaatgtgcacatgcgtatgtatttgcttgtgaaattaaagtcacctcttgcctctgctttcctgatcattcgttagagaaatggatcaggcatttttttaaattattattctttctctaaactatttgcattgtgttcaaaaacccattttagaagtttgaacagcaagcttttcctgattttaaaaacacaaagttgctttcaatgaaatattttgtgatttttttaaagtccccaaatgtgtacttagccttctgttattccttattctttaagcagtgttggcttccattgaccatatgaaggccaccaattaaatggttgtgttaatccaacatgtaaaaaactttttggcagggcacagtggctcacgcctgtaatcccaacactttgggaggctgaggcaggaggatcacttgagcccaggagattgacgccgcagtgaactatgattgtgcccctgcactccagcctggatgacagagtgagaccccatctcttaaaaaataaaaaaaaataaaaatttgaacctgtttc

SEQ ID NO: 143 - DNA, 1897 bp, Homo sapiens
acaaggggcggtccccggtgtcctgcgcgggggcgcggagggggcgggcgtcagttccgcggggggctgtcggggaaccatggctgccccgagagacaatgtcactttattattcaagttatactgcttggcagtgatgaccctgatggctgcagtctataccatagctttaagatacacaaggacatcagacaaagaactctacttttcaaccacagccgtgtgtatcacagaagttataaagttattgctaagtgtgggaattttagctaaagaaactggtagtctgggtagattcaaagcatctttaagagaaaatgtcttggggagccccaaggaactgttgaagttaagtgtgccatcgttagtgtatgctgttcagaacaacatggctttcctagctcttagcaatctggatgcagcagtgtaccaggtgacctaccagttgaagattccgtgtactgctttatgcactgttttaatgttaaaccggacactcagcaaattacagtgggtttcagtttttatgctgtgtgctggagttacgcttgtacagtggaaaccagcccaagctacaaaagtggtggtggaacaaaatccattattagggtttggcgctatagctattgctgtattgtgctcaggatttgcaggagtatattttgaaaaagttttaaagagttcagatacttctctttgggtgagaaacattcaaatgtatctatcagggattattgtgacattagctggcgtctacttgtcagatggagctgaaattaaagaaaaaggatttttctatggttacacatattatgtctggtttgtcatctttcttgcaagtgttggtggcctctacacttctgttgtggttaagtacacagacaacatcatgaaaggcttttctgcagcagcggccattgtcctttccaccattgcttcagtaatgctgtttggattacagataacactcacctttgccctgggtactcttcttgtatgtgtttccatatatctctatggattacccagacaagacactacatccatccaacaaggagaaacagcttcaaaggagagagttattggtgtgtgattttagcctcacgtgagactccttttaagactaaaccatttgcattaaactagagccttaagtcaatctcagaaggtagcataaacaaataaaaattaactgtatggcatgatcagtgcggttatgtggaaacaacaacaaacaaacgaagctatctgagtgaactgctaatacagaaacttaatgtagacctgtttggggtctactattgttttagaatgaaggaattgtattattgtgtgtatatataatttgtaaataaaaagtatggagatgatacggtgttaaaaaaaatcatggtaaggctacaatactcaagtaacaaggtttgggacaatgtctaagggttaaagtgccaaagccatttctgtactaactgttctcttgttccggtaccggggagaaggatgacccctccttattctccaattcatgtacagtattttgtcctagcagcataaagacctagctcttttcttacaagaggcagaaacaagacaggctagttcataaacaaactgtgtaacttctcaaaatgaatctatttcataactcggacaatttctgggtggtgactgagtacccctttagtgagtacccctttagtgctatatttgtgccattcattatctggttcatatttcttttctgttagatgatacacatttcttcaaaaaaatttctaatgtcacttttgtacttttttaaataaagtatgtttaactgttgggctctcaataatttgtgaaatttcagtgttttctataatgttaatggggaaattcagcaataaactttatttgt

SEQ ID NO: 144 - DNA, 3487 bp, Homo sapiens
aaggccacgtgggggcgtgtcaggaagtgagtccagggcccgcctcccggggagtcggcctcggatgtccggaggctcctgggctgagccggcgacagagcccgggaaggcagcgagacgtgggcgccggcccagccccctcccgcgtccttcagccccaagccccgagcccctctgacccttccgcagccctccctccagccgcgcccggcctccggcagctccctgtacgcctccctccccctgcccgcccctccctcccacagccgcccatgacgccctctcggcacctcttcccactctgccacgcgtccttttcctgcaccttcgccccgcgtacctactcctgccccgccctgccattcctctcccctcccttctctctgcgacccctccctgttaggccccagcctcttctcccctcacaggtcttctctgtcctggcctcaccgccttatcctattcctctcccttgccctgtgtcttgtctcagagccccctcggggtgggagtaggttgtggagcagcacaactgggctcaccccaaagcagaacttctcaatccatgaggacaatggggaggcctttaggccagcccacatgtgacaatggagggctgcggcttccttgcggagagcacaagtgagctcactgccctggactccagggaatcagagttctggccgcggggtgacccagctcctctgctaccatgaatagggcccctctgaagcggtccaggatcctgcacatggcgctgaccggggcctcagacccctctgcagaggcagaggccaacggggagaagccctttctgctgcgggcattgcagatcgcgctggtggtctccctctactgggtcacctccatctccatggtgttccttaataagtacctgctggacagcccctccctgcggctggacacccccatcttcgtcaccttctaccagtgcctggtgaccacgctgctgtgcaaaggcctcagcgctctggccgcctgctgccctggtgccgtggacttccccagcttgcgcctggacctcagggtggcccgcagcgtcctgcccctgtcggtggtcttcatcggcatgatcaccttcaataacctctgcctcaagtacgtcggtgtggccttctacaatgtgggccgctcactcaccaccgtcttcaacgtgctgctctcctacctgctgctcaagcagaccacctccttctatgccctgctcacctgcggtatcatcatcgggggcttctggcttggtgtggaccaggagggggcagaaggcaccctgtcgtggctgggcaccgtcttcggcgtgctggctagcctctgtgtctcgctcaacgccatctacaccacgaaggtgctcccggcggtggacggcagcatctggcgcctgactttctacaacaacgtcaacgcctgcatcctcttcctgcccctgctcctgctgctcggggagcttcaggccctgcgtgactttgcccagctgggcagtgcccacttctgggggatgatgacgctgggcggcctgtttggctttgccatcggctacgtgacaggactgcagatcaagttcaccagtccgctgacccacaatgtgtcgggcacggccaaggcctgtgcccagacagtgctggccgtgctctactacgaggagaccaagagcttcctctggtggacgagcaacatgatggtgctgggcggctcctccgcctacacctgggtcaggggctgggagatgaagaagactccggaggagcccagccccaaagacagcgagaagagcgccatgggggtgtgagcaccacaggcaccctggatggcccggccccggggcccgtacacaggcggggccagcacagtagtgaaggcggtctcctggaccccagaagcgtgctgtggtgtggactgggtgctacttatagacccaatcagaatacggtggttgagaaggaaccagtgtttacaagtaatatcagaaagttgaaggaaccagtgtttacaagtaataccagaaagttgccaaacccttctctatcctctcgtatttctgagtttttgtccttcccgagggagcaccctagtgagagttgaaccccttccttctgcctccagggcctgtctgcctccacatcactctgaggacagggacaggcaacaaccttgaagggacagcaatggcaaagccacaaaggcttcactgtactcaggggagatggccctaccacagccacctggagagggttgggaagccttccgtctgcggtgggcaggcagcctcaccctgggcccacagaccggccttcctttggaggaaagtgtggcctggactgagggaggaaatgagcgagttccctctgacaccagcagatccccaggggctgctgggcagtggcctgggaatggggtggattgtgagaaagtgctcaccatctatacaccctgtatgtccagcttttgaacacaagggaaccatgcttctcttagaggttaagcagggtcattaacatcctcccccagtccctaacatcacattgtcctgcgtggctcctctggccctgagtggcacctgtccctctggtctcccagcacctggcccaggtaacagccttctgaaagcagagccaaggagctgcttctctcttctcccagttctacctccccagaagccttcctccccaggtggggctgatggagcaagggtccagactaggagccttccaccccagctgtgtctggcgcccctagatctctgcaagggaggtgttacagctggttctgagccgcttgccttgtgatggtaagacaccaacctttacattcttccctgaggttgtggctgacagagcctgcttggccccactgttagtccagcgagctcctatatcaaaatgccgtaggccgggtggcttacaaacaacagaaacgtattgctcacagtcctggggggctgggacgcccaagatcaagaggccagcagattcggactccgctgagggctgtttcccgatccatagatggtgccttctcgctgtatcctcaatggtagaagcacaaacaagcaagctccttcctgcctcttttataaggactccaaccctgttcatgagggttccgcccccatgacccaatcagctccaaaggccccacctcctaatactgtcaccttgggggtgagaattccaatgtgaatttgcagggggagtgggggacacacacaaatttcggggccataccacccttcaccacaccctcctgcgctcagggtggcttgcagtccctggcccttctggtgggcatttggtatgtcctttctcttggggtgatttctgatgtttttactctatatagtgaaaagctagggagagcgggtcttctcccccctccctctccagtcccctcacaatcccagatgggttctaatgcagctgctggggcctgatgccctgagttgtttgtgattcaataaagaatccataag

SEQ ID NO: 145 - DNA, 3619 bp, Homo sapiens
agtcctgggcgaagggggcggtggttccccgcggcgctgcgcgcggcggtaattagtgattgtcttccagcttcgcgaaggctaggggcgcggctgccgggtggctgcgcggcgctgcccccggaccgaggggcagccaacccaatgaaaccaccgcgtgttcgcgcctggtagagatttctcgaagacaccagtgggcccgttccgagccctctggaccgcccgtgtggaaccaaacctgcgcgcgtggccgggccgtgggacaacgaggccgcggagacgaaggcgcaatggcgaggaagttatctgtaatcttgatcctgacctttgccctctctgtcacaaatccccttcatgaactaaaagcagctgctttcccccagaccactgagaaaattagtccgaattgggaatctggcattaatgttgacttggcaatttccacacggcaatatcatctacaacagcttttctaccgctatggagaaaataattctttgtcagttgaagggttcagaaaattacttcaaaatataggcatagataagattaaaagaatccatatacaccatgaccacgaccatcactcagaccacgagcatcactcagaccatgagcgtcactcagaccatgagcatcactcagagcacgagcatcactctgaccatgatcatcactctcaccataatcatgctgcttctggtaaaaataagcgaaaagctctttgcccagaccatgactcagatagttcaggtaaagatcctagaaacagccaggggaaaggagctcaccgaccagaacatgccagtggtagaaggaatgtcaaggacagtgttagtgctagtgaagtgacctcaactgtgtacaacactgtctctgaaggaactcactttctagagacaatagagactccaagacctggaaaactcttccccaaagatgtaagcagctccactccacccagtgtcacatcaaagagccgggtgagccggctggctggtaggaaaacaaatgaatctgtgagtgagccccgaaaaggctttatgtattccagaaacacaaatgaaaatcctcaggagtgtttcaatgcatcaaagctactgacatctcatggcatgggcatccaggttccgctgaatgcaacagagttcaactatctctgtccagccatcatcaaccaaattgatgctagatcttgtctgattcatacaagtgaaaagaaggctgaaatccctccaaagacctattcattacaaatagcctgggttggtggttttatagccatttccatcatcagtttcctgtctctgctgggggttatcttagtgcctctcatgaatcgggtgtttttcaaatttctcctgagtttccttgtggcactggccgttgggactttgagtggtgatgcttttttacaccttcttccacattctcatgcaagtcaccaccatagtcatagccatgaagaaccagcaatggaaatgaaaagaggaccacttttcagtcatctgtcttctcaaaacatagaagaaagtgcctattttgattccacgtggaagggtctaacagctctaggaggcctgtatttcatgtttcttgttgaacatgtcctcacattgatcaaacaatttaaagataagaagaaaaagaatcagaagaaacctgaaaatgatgatgatgtggagattaagaagcagttgtccaagtatgaatctcaactttcaacaaatgaggagaaagtagatacagatgatcgaactgaaggctatttacgagcagactcacaagagccctcccactttgattctcagcagcctgcagtcttggaagaagaagaggtcatgatagctcatgctcatccacaggaagtctacaatgaatatgtacccagagggtgcaagaataaatgccattcacatttccacgatacactcggccagtcagacgatctcattcaccaccatcatgactaccatcatattctccatcatcaccaccaccaaaaccaccatcctcacagtcacagccagcgctactctcgggaggagctgaaagatgccggcgtcgccactctggcctggatggtgataatgggtgatggcctgcacaatttcagcgatggcctagcaattggtgctgcttttactgaaggcttatcaagtggtttaagtacttctgttgctgtgttctgtcatgagttgcctcatgaattaggtgactttgctgttctactaaaggctggcatgaccgttaagcaggctgtcctttataatgcattgtcagccatgctggcgtatcttggaatggcaacaggaattttcattggtcattatgctgaaaatgtttctatgtggatatttgcacttactgctggcttattcatgtatgttgctctggttgatatggtacctgaaatgctgcacaatgatgctagtgaccatggatgtagccgctgggggtatttctttttacagaatgctgggatgcttttgggttttggaattatgttacttatttccatatttgaacataaaatcgtgtttcgtataaatttctagttaaggtttaaatgctagagtagcttaaaaagttgtcatagtttcagtaggtcatagggagatgagtttgtatgctgtactatgcagcgtttaaagttagtgggttttgtgatttttgtattgaatattgctgtctgttacaaagtcagttaaaggtacgttttaatatttaagttattctatcttggagataaaatctgtatgtgcaattcaccggtattaccagtttattatgtaaacaagagatttggcatgacatgttctgtatgtttcagggaaaaatgtctttaatgctttttcaagaactaacacagttattcctatactggattttaggtctctgaagaactgctggtgtttaggaataagaatgtgcatgaagcctaaaataccaagaaagcttatactgaatttaagcaaagaaataaaggagaaaagagaagaatctgagaattggggaggcatagattcttataaaaatcacaaaatttgttgtaaattagaggggagaaatttagaattaagtataaaaaggcagaattagtatagagtacattcattaaacatttttgtcaggattatttcccgtaaaaacgtagtgagcacttttcatatactaatttagttgtacatttaactttgtataatacagaaatctaaatatatttaatgaattcaagcaatatatcacttgaccaagaaattggaatttcaaaatgttcgtgcgggtatataccagatgagtacagtgagtagttttatgtatcaccagactgggttattgccaagttatatatcaccaaaagctgtatgactggatgttctggttacctggtttacaaaattatcagagtagtaaaactttgatatatatgaggatattaaaactacactaagtatcatttgattcgattcagaaagtactttgatatctctcagtgcttcagtgctatcattgtgagcaattgtcttttatatacggtactgtagccatactaggcctgtctgtggcattctctagatgtttcttttttacacaataaattccttatatcagcttg

SEQ ID NO: 146 - DNA, 7757 bp, Homo sapiens
ctcactgtccctggaatcttcaagggagttactgcattacatcatcagaaacaaggcatttctatattactatggaaagatttcgtctggagaagaagttacctggtcctgatgaagaagctgttgtggatcttggcaaaactagctcaactgtgaacaccaagtttgaaaaagaagaactagaaagtcatagagctgtatatattggtgttcacgtcccgtttagtaaagagagtcgtcggcgtcataggcatcgcggacacaaacatcaccaccggagaagaaaagataaagaatcagataaagaagatggacgggaatctccttcttatgatacaccatcccagagagttcagtttatccttggtactgaagatgatgatgaagaacatattccccatgatctcttcacggaaatggatgaactgtgttacagagatggagaagaatatgaatggaaagaaactgctagatggctgaaatttgaagaggatgttgaagatggcggtgaccgatggagtaaaccttatgtggcaactctctctttgcacagtctttttgaactaaggagttgcatcctcaatggaacagtcatgctggatatgagagcaagcactctagatgaaatagcagatatggtattagacaacatgatagcttctggccaattagacgagtccatacgagagaatgtcagagaagctcttctgaagagacatcatcatcagaatgagaaaagattcaccagtcggattcctcttgttcgatcttttgcagatataggcaagaaacattctgaccctcacttgcttgaaaggaatggggaaggcctttcagcctcccgccactctttgcgaacaggtctgtctgcctcaaacctttccttgagaggagaatcacctttatctcttcttcttggtcatcttcttccttcttcaagagctggaacccctgcaggctcaaggtgtacaaccccagtacccacccctcaaaacagtcctccttctagccctagcatcagccgcctgacctccagaagttcccaagagagtcagcgtcaggccccagaactactggtttcacctgccagtgatgatattcccacagtagtaattcatccgcctgaggaagacttagaagcagcgctgaaaggcgaggagcagaagaatgaggaaaatgttgacttaactccaggtattttggcctctccccagtctgctcctggaaacttggacaatagtaaaagtggagaaattaaaggtaatggaagtggtggaagcagagaaaatagtactgttgacttcagcaaggttgatatgaatttcatgagaaaaattcctacgggtgctgaggcatccaacgtcctggtgggcgaagtagactttttggaaaggccaataattgcatttgtgagactggctcctgctgtcctccttacagggttgactgaggtccctgttccaaccaggtttttgtttttgttattgggtccagcgggcaaggcaccacagtaccatgaaattggacgatcaatagccactctcatgacagatgagattttccatgatgtagcttataaagcaaaagacagaaatgacctcttatctggaattgatgaatttttagatcaagtaactgtcctacctccaggagagtgggatccttctatacgcatagaaccaccaaaaagtgtcccttctcaggaaaagagaaagattcctgtgtttcacaatggatctacccccacactgggtgagactcctaaagaggccgctcatcatgctgggcctgagctacagaggactggacggctttttggtggtttgatacttgacatcaaaaggaaagcaccttttttcttgagtgacttcaaggatgcattaagcctgcagtgcctggcctcgattcttttcctatactgtgcctgtatgtctcctgtaatcacttttggagggctgcttggagaagctacagaaggcagaataagtgcaatagagtctctttttggagcatcattaactgggattgcctattcattgtttgctgggcaacctctaacaatattggggagcacaggtccagttctagtgtttgaaaaaattttatataaattctgcagagattatcaactttcttatctgtctttaagaaccagtattggtctgtggacttcttttttgtgcattgttttggttgcaacagatgcaagcagccttgtgtgttatattactcgatttacagaagaggcttttgcagcccttatttgcatcatattcatctacgaggctttggagaagctctttgatttaggagaaacatatgcatttaatatgcacaacaacttagataaactgaccagctactcatgtgtatgtactgaacctccaaaccccagcaatgaaactctagcacaatggaagaaagataatataacagcacacaatatttcctggagaaatcttactgtttctgaatgtaaaaaacttcgtggtgtattcttggggtcagcttgtggtcatcatggaccttatattccagatgtgctcttttggtgtgtcatcttgtttttcacaacattttttctgtcttcattcctcaagcaatttaagaccaagcgttactttcctaccaaggtgcgatcgacaatcagtgattttgctgtatttctcacaatagtaataatggttacaattgactaccttgtaggagttccatctcctaaacttcatgttcctgaaaaatttgagcctactcatccagagagagggtggatcataagcccactgggagataatccttggtggaccttattaatagctgctattcctgctttgctttgtaccattctcatctttatggatcaacaaatcacagctgtaattataaacagaaaggaacacaaattgaagaaaggagctggctatcaccttgatttgctcatggttggcgttatgttgggagtttgctctgtcatgggacttccatggtttgtggctgcaacagtgttgtcaataagtcatgtcaacagcttaaaagttgaatctgaatgttctgctccaggggaacaacccaagtttttgggaattcgtgaacagcgggttacagggctaatgatttttattctaatgggcctctctgtgttcatgacttcagtcctaaagtttattccaatgcctgttctgtatggtgttttcctttatatgggagtttcctcattaaaaggaatccagttatttgaccgtataaaattatttggaatgcctgctaagcatcagcctgatttgatatacctccgttatgtgccgctctggaaggtccatattttcacagtcattcagcttacttgtttggtccttttatgggtgataaaagtttcagctgctgcagtggtttttcccatgatggttcttgcattagtgtttgtgcgcaaactcatggacctgtgtttcacgaagagagaacttagttggcttgatgatcttatgccagaaagtaagaaaaagaaagaagatgacaaaaagaaaaaagagaaagaggaagctgaacggatgcttcaagatgatgatgatactgtgcaccttccatttgaagggggaagtctcttgcaaattccagtcaaggccctaaaatatagtcctgataaacctgtgagtgtgaaaataagttttgaagatgaaccaagaaagaaatacgtggatgctgaaacttcattatagaattgaaccaagaggcattatacatatagatatatacatatgtaatgtgtgcgtatcatgtcactatatataagaatattgtatgtcatgctgtttatgtgtgactaccgggtttttaaaagtagtgtctggagtttgtaatgagcaccgtggagactatgtatttaatgaaatgctctctttgaagtgaggtacatggttcttaactattcaaatatttattctgttagaaaaaaaaattttctgttttgcaatagaaggatgtggagaaatgctttcagtctacttttcttaaatctctgttcatcagtggcaattcgtaaaaaccttaagtgatactttgtttatatgtttataatttttaggtgtttcctgaaattttcacatattatttcacttttgttagtgctttatgggaagaatagggagtctataccagtgctgtgggaaaaatggtaacatttcagggcttctctatttgtgtttcatttctgtagatgtccatcgtgtttcactaactggcgttttcttagccatagagatgactgtagaacaatagaaactttaataatgatagtttttaacttttatgtttaaattttttttaaatcttaaaaccttcatatctaggtatccattgtgacagacaagtaaaattgcaggtgatttgataattaagcacccataccatttataacttctgaatttaaaaagttatacaatgccagtttgcaatagttgattttgatgcctttgtagaatattttttctgaatccttatgctcttttaaagccaatgattcccactctgttctctgccttgtctctctttgtcttaaaatgctttagtttccatcaggttcaagttcttgactattattctcttataagtagtaggcgtaaataatcaggagttagaattctctcagaagggtctatgatcagtattactttattaagaattacctttcattttctctttatgttattctttcacttttgtagattacatttaatagcttgttacctgtgattttattttaaaatatttattttgatatgatgcttaaatattatataaacatttggaaaagtaacaaatagagtaaattgttaatgtaaatagttggtgcttactttcatttatgtttattatcttaaagcaattgatagattttacatctttgatataaagcactgccatatttatattttaaaaggaaattagacattttatatgtagctcagattaatgacatttttattttgtgtattagtttttgcttttctgagctttttaaagtctaacaaatctttttagtcatcttttatatacttttagttccacatgaaataaatgttgttaagcctgtaggactggatgaatggggttgtgaaactgatttgacaagagaataatttacaaaaatcaaatgagtattgagaagccacagaaatatcaaaaatggtgacatcactattaggatgaaaattttatgaaattccaatgctccctttaaccatataattaaattacaaaggtatacataattaatctaataaaggatcatgaggaatgccaaaagctgaaattttagcaagtctggtgttttaaattcattataaactatttattaactaatgtaatgtcctcctctaagaccatattgtaagagtcttgttaaaatgatggattcaacttctgcctcggatgagaggttggaaatgtagctgcttttctttagaaaatatgtagctgtcatcatttggtactgcctaaaaagagttagactctattggcaattgatagagtattacccacggtgcttattattgtttatgagcttccattgtaatgattcctttttatttgtagcagcataattatttccaaagaccccagtatttgctgctatttttaaaactcccctgatgtacctgaacaagaggatttcctcacatcatttccttgtgtctggacatcaggggtaacaactgtacttactttacaggaagaaattttaaaactgaaaactacctgggatcatagtgtttctgtgattttatttaattgtgtatagtaattatccagtgccagaaaaaccgtcacttgcaaaatactttgcactcaaaatgtttttacaatgcttctaaatgttactggtttctgctttcttttgactacttgactgacaaaatgatctgactactccatttaagagcaaaggtaactcatgtttaggtaattaactgcttgttttaagtgattatatttcttccactgtttttgaaaaataatcaaagatagcattcattgagagacagtgacagatataatttactacatatattgatttttaaataaagttgccttaaataagtgtatgtaagcagtagtagttgctatgtactgatttacctcaaggtgcaaaataattaaacctgtacatattccatttacaaaataaattcagccctgcactttctttagatgccttgatttccagaatggagcttagtgctactgaataccctggccacagagccacctcaggatattcttttctccaccctagtttatttatttatagatatctgtttacaaagtctgtagtaaatcctgatgctgaccatctgaaatgtactttttttctgaatgctgtttcaatctaaaatagcagcttttgagaaaacaatgatgtaaattccttatgataaaaggatgattctatatattctttaatgatattaaatatgccgaagccaagcacacagtctttctaaagtgtgtgtatgtttgtgtgaatgtgaatgatactgatcttatatctgttaaaagttgttttaaaaagctgtggcatcccattgttcatatttgccaagtcttctgtaaagatgtctaggacgaaatattttatgtgctaatgcatgtatttgtaaaccagatttgtttaccactcaaaattaacttgttttcttcatccaaaaaagtttatttcttccacgtacttaaattttctgtgtgggtataatatagctttctaatttttttctttcacaaaggcaggttcaaaattctgttgaaagaaaaatgctttctgaaactgaggtataacaccagagcttgctgtttaaaggattatatgatgtacatcagttctataaatgtgctcagcagtttaacatgtgaatcctgttttaaagtgctcagatttcaactgtgtaagccattgatataacgctgtaattaaaaatgtttatatgaaataacttaatgttttaaatttatttatgtagatcacatcatttttatcgtatgcagtgcaaatatgtgaaatgtcttttggtttattccaacaattatttattttagaaagtaagtttaaagactttaaggacattcaaagtttaaaatagtgttcaaattgcaaaatttggcaatcttcatataaattggtttcttttctaacttttcaaaaactaacattaaatgtcaattataggaaaacatagttggaaatgtaatcatccaaagatcatttttaaaatgaaatttaattagcacatattgaacatttgacttaattgttaaaccccagttttgttttgtttttttaatcagatttttgcacactgattagtttttgtgttgtggcttttgttgctttattattcaaggttttttttttttttcttccccatgggggagattgtcttccaatgtttaactacgtttaaataaataaaaattgaattttattgttcatttatataaaatctgataccttgatgtaatttcacaatacagttccaatttttatggcttttataattacaatgatattttcttctataataaaatccaaagtaaacatttaaattgtagaactgatatttttcatttatatgaagtataagcctctactgggtctatattgtgaatcatcctgcctttcaaatttgtttcataattgttagatgaaaactatttttttggagatgttactgaagttgattgagcaataaaagtctacttaatta

SEQ ID NO: 147 - DNA, 4556 bp, Homo sapiens
gacgcagctgcgggcggcgggcggcgcgcacactgctcgctgggccgcggctcccgggtgtcccaggcccggccggtgcgcagagcatggcgggtgcgggcccgaagcggcgcgcgctagcggcgccggcggccgaggagaaggaagaggcgcgggagaagatgctggccgccaagagcgcggacggctcggcgccggcaggcgagggcgagggcgtgaccctgcagcggaacatcacgctgctcaacggcgtggccatcatcgtggggaccattatcggctcgggcatcttcgtgacgcccacgggcgtgctcaaggaggcaggctcgccggggctggcgctggtggtgtgggccgcgtgcggcgtcttctccatcgtgggcgcgctctgctacgcggagctcggcaccaccatctccaaatcgggcggcgactacgcctacatgctggaggtctacggctcgctgcccgccttcctcaagctctggatcgagctgctcatcatccggccttcatcgcagtacatcgtggccctggtcttcgccacctacctgctcaagccgctcttccccacctgcccggtgcccgaggaggcagccaagctcgtggcctgcctctgcgtgctgctgctcacggccgtgaactgctacagcgtgaaggccgccacccgggtccaggatgcctttgccgccgccaagctcctggccctggccctgatcatcctgctgggcttcgtccagatcgggaagggtgatgtgtccaatctagatcccaacttctcatttgaaggcaccaaactggatgtggggaacattgtgctggcattatacagcggcctctttgcctatggaggatggaattacttgaatttcgtcacagaggaaatgatcaacccctacagaaacctgcccctggccatcatcatctccctgcccatcgtgacgctggtgtacgtgctgaccaacctggcctacttcaccaccctgtccaccgagcagatgctgtcgtccgaggccgtggccgtggacttcgggaactatcacctgggcgtcatgtcctggatcatccccgtcttcgtgggcctgtcctgcttcggctccgtcaatgggtccctgttcacatcctccaggctcttcttcgtggggtcccgggaaggccacctgccctccatcctctccatgatccacccacagctcctcacccccgtgccgtccctcgtgttcacgtgtgtgatgacgctgctctacgccttctccaaggacatcttctccgtcatcaacttcttcagcttcttcaactggctctgcgtggccctggccatcatcggcatgatctggctgcgccacagaaagcctgagcttgagcggcccatcaaggtgaacctggccctgcctgtgttcttcatcctggcctgcctcttcctgatcgccgtctccttctggaagacacccgtggagtgtggcatcggcttcaccatcatcctcagcgggctgcccgtctacttcttcggggtctggtggaaaaacaagcccaagtggctcctccagggcatcttctccacgaccgtcctgtgtcagaagctcatgcaggtggtcccccaggagacatagccaggaggccgagtggctgccggaggagcatgcgcagaggccagttaaagtagatcacctcctcgaacccactccggttccccgcaacccacagctcagctgcccatcccagtccctcgccgtccctcccaggtcgggcagtggaggctgctgtgaaaactctggtacgaatctcatccctcaactgagggccagggacccaggtgtgcctgtgctcctgcccaggagcagcttttggtctccttgggccctttttcccttccctcctttgtttacttatatatatattttttttaaacttaaattttgggtcaacttgacaccactaagatgattttttaaggagctgggggaaggcaggagccttcctttctcctgccccaagggcccagaccctgggcaaacagagctactgagacttggaacctcattgctaccacagacttgcactgaagccggacagctgcccagacacatgggcttgtgacattcgtgaaaaccaaccctgtgggcttatgtctctgccttagggtttgcagagtggaaactcagccgtagggtggcactgggagggggtgggggatctgggcaaggtgggtgattcctcccaggaggtgcttgaggccccgatggactcctgaccataatcctagccccgagacaccatcctgagccagggaacagccccagggttggggggtgccggcatctcccctagctcaccaggcctggcctctgggcagtgtggcctcttggctatttctgtgtccagttttggaggctgagttctggttcatgcagacaaagccctgtccttcagtcttctagaaacagagacaagaaaggcagacacaccgcggccaggcacccatgtgggcgcccaccctgggctccacacagcagtgtcccctgccccagaggtcgcagctaccctcagcctccaatgcattggcctctgtaccgcccggcagccccttctggccggtgctgggttcccactcccggcctaggcacctccccgctctccctgtcacgctcatgtcctgtcctggtcctgatgcccgttgtctaggagacagagccaagcactgctcacgtctctgccgcctgcgtttggaggcccctgggctctcacccagtccccacccgcctgcagagagggaactagggcaccccttgtttctgttgttcccgtgaatttttttcgctatgggaggcagccgaggcctggccaatgcggcccactttcctgagctgtcgctgcctccatggcagcagccagggacccccagaacaagaagaccccgcaggatccctcctgagctcggggggctctgccttctcaggccccgggcttcccttctccccagccagaggtggagccaagtggtccagcgtcactccagtgctcagctgtggctggaggagctggcctgtggcacagccctgagtgtcccaagccgggagccaacgaagccggacacggcttcactgaccagcggctgctcaagccgcaagctctcagcaagtgcccagtggagcctgccgcccccgcctgggcaccgggaccccctcaccatccagtgggcccggagaaacctgatgaacagtttggggactcaggaccagatgtccgtctctcttgcttgaggaatgaagacctttattcacccctgccccgttgcttcccgctgcacatggacagacttcacagcgtctgctcataggacctgcatccttcctggggacgaattccactcgtccaagggacagcccacggtctggaggccgaggaccaccagcaggcaggtggactgactgtgttgggcaagacctcttccctctgggcctgttctcttggctgcaaataaggacagcagctggtgccccacctgcctggtgcattgctgtgtgaatccaggaggcagtggacatcgtaggcagccacggccccgggtccaggagaagtgctccctggaggcacgcaccactgcttcccactggggccggcggggcccacgcacgacgtcagcctcttaccttcccgcctcggctaggggtcctcgggatgccgttctgttccaacctcctgctctgggacgtggacatgcctcaaggatacagggagccggcggcctctcgacggcacgcacttgcctgttggctgctgcggctgtgggcgagcatgggggctgccagcgtctgttgtggaaagtagctgctagtgaaatggctggggccgctggggtccgtcttcacactgcgcaggtctcttctgggcgtctgagctggggtgggagctcctccgcagaaggttggtggggggtccagtctgtgatccttggtgctgtgtgccccactccagcctggggaccccacttcagaaggtaggggccgtgtcccgcggtgctgactgaggcctgcttccccctccccctcctgctgtgctggaattccacagggaccagggccaccgcaggggactgtctcagaagacttgatttttccgtccctttttctccacactccactgacaaacgtccccagcggtttccacttgtgggcttcaggtgttttcaagcacaacccaccacaacaagcaagtgcattttcagtcgttgtgcttttttgttttgtgctaacgtcttactaatttaaagatgctgtcggcaccatgtttatttatttccagtggtcatgctcagccttgctgctctgcgtggcgcaggtgccatgcctgctccctgtctgtgtcccagccacgcagggccatccactgtgacgtcggccgaccaggctggacaccctctgccgagtaatgacgtgtgtggctgggaccttctttattctgtgttaatggctaacctgttacactgggctgggttgggtagggtgttctggcttttttgtggggtttttatttttaaagaaacactcaatcatcct

SEQ ID NO: 148 - DNA, 1553 bp, Homo sapiens
atgctcaattccaaacacagtctgtcaactcatcggagccccactggtgagaaagccaaggctggcagcaggtttggtgccacctcttggtgccagagccacctgcacacagcatggagcaagggaatagccagggtgccctggatccagttccttccagaagccagcagccctagggctcctccatcccactcccagcaagaagaagctgccatgaatatgaaggacgttccggaaccctgcggacgcggggcgccagcaggtggcgctggacgcgcaacggacaaggaggcggggcctgcagctggcttggaggctccgcgctctggaggctcaggcgccgcgtggggcccgcacctctgggcagcagcggcagccgagactcacggtcaagctaaggcgaagagtgggtggctgaagccatactattttatagaattaatggaaagcagaaaagacatcacaaaccaagaagaactttggaaaatgaagcctaggagaaatttagaagaagacgattatttgcataaggacacgggagagaccagcatgctaaaaagacctgtgcttttgcatttgcaccaaacagcccatgctgatgaatttgactgcccttcagaacttcagcacacacaggaactctttccacagtggcacttgccaattaaaatagctgctattatagcatctctgacttttctttacactcttctgagggaagtaattcaccctttagcaacttcccatcaacaatatttttataaaattccaatcctggtcatcaacaaagtcttgccaatggtttccatcactctcttggcattggtttacctgccaggtgtgatagcagcaattgtccaacttcataatggaaccaagtataagaagtttccacattggttggataagtggatgttaacaagaaagcagtttgggcttctcagtttcttttttgctgtactgcatgcaatttatagtctgtcttacccaatgaggcgatcctacagatacaagttgctaaactgggcatatcaacaggtccaacaaaataaagaagatgcctggattgagcatgatgtttggagaatggagatttatgtgtctctgggaattgtgggattggcaatactggctctgttggctgtgacatctattccatctgtgagtgactctttgacatggagagaatttcactatattcagagcaagctaggaattgtttcccttctactgggcacaatacacgcattgatttttgcctggaataagtggatagatataaaacaatttgtatggtatacacctccaacttttatgatagctgttttccttccaattgttgtcctgatatttaaaagcatactattcctgccatgcttgaggaagaagatactgaagattagacatggttgggaagacgtcaccaaaattaacaaaactgagatatgttcccagttgtagaattactgtttacacacatttttgttcaatattgatatattttatcaccaacatttcaagtttgtatttgttaataaaatgattattcaagg

SEQ ID NO: 149 - DNA, 2805 bp, Homo sapiens
ctccttgcacgggccggcccagcttccccgcccctggcgtccgctccctcccgctcgcagcttacttaacctggcccgggcggcggaggcgctctcacttccctggagccgcccgcttgcccgtcggtcgctagctcgctcggtgcgcgtcgtcccgctccatggcgctcttcgtgcggctgctggctctcgccctggctctggccctgggccccgccgcgaccctggcgggtcccgccaagtcgccctaccagctggtgctgcagcacagcaggctccggggccgccagcacggccccaacgtgtgtgctgtgcagaaggttattggcactaataggaagtacttcaccaactgcaagcagtggtaccaaaggaaaatctgtggcaaatcaacagtcatcagctacgagtgctgtcctggatatgaaaaggtccctggggagaagggctgtccagcagccctaccactctcaaacctttacgagaccctgggagtcgttggatccaccaccactcagctgtacacggaccgcacggagaagctgaggcctgagatggaggggcccggcagcttcaccatcttcgcccctagcaacgaggcctgggcctccttgccagctgaagtgctggactccctggtcagcaatgtcaacattgagctgctcaatgccctccgctaccatatggtgggcaggcgagtcctgactgatgagctgaaacacggcatgaccctcacctctatgtaccagaattccaacatccagatccaccactatcctaatgggattgtaactgtgaactgtgcccggctgctgaaagccgaccaccatgcaaccaacggggtggtgcacctcatcgataaggtcatctccaccatcaccaacaacatccagcagatcattgagatcgaggacacctttgagacccttcgggctgctgtggctgcatcagggctcaacacgatgcttgaaggtaacggccagtacacgcttttggccccgaccaatgaggccttcgagaagatccctagtgagactttgaaccgtatcctgggcgacccagaagccctgagagacctgctgaacaaccacatcttgaagtcagctatgtgtgctgaagccatcgttgcggggctgtctgtagagaccctggagggcacgacactggaggtgggctgcagcggggacatgctcactatcaacgggaaggcgatcatctccaataaagacatcctagccaccaacggggtgatccactacattgatgagctactcatcccagactcagccaagacactatttgaattggctgcagagtctgatgtgtccacagccattgaccttttcagacaagccggcctcggcaatcatctctctggaagtgagcggttgaccctcctggctcccctgaattctgtattcaaagatggaacccctccaattgatgcccatacaaggaatttgcttcggaaccacataattaaagaccagctggcctctaagtatctgtaccatggacagaccctggaaactctgggcggcaaaaaactgagagtttttgtttatcgtaatagcctctgcattgagaacagctgcatcgcggcccacgacaagagggggaggtacgggaccctgttcacgatggaccgggtgctgacccccccaatggggactgtcatggatgtcctgaagggagacaatcgctttagcatgctggtagctgccatccagtctgcaggactgacggagaccctcaaccgggaaggagtctacacagtctttgctcccacaaatgaagccttccgagccctgccaccaagagaacggagcagactcttgggagatgccaaggaacttgccaacatcctgaaataccacattggtgatgaaatcctggttagcggaggcatcggggccctggtgcggctaaagtctctccaaggtgacaagctggaagtcagcttgaaaaacaatgtggtgagtgtcaacaaggagcctgttgccgagcctgacatcatggccacaaatggcgtggtccatgtcatcaccaatgttctgcagcctccagccaacagacctcaggaaagaggggatgaacttgcagactctgcgcttgagatcttcaaacaagcatcagcgttttccagggcttcccagaggtctgtgcgactagcccctgtctatcaaaagttattagagaggatgaagcattagcttgaagcactacaggaggaatgcaccacggcagctctccgccaatttctctcagatttccacagagactgtttgaatgttttcaaaaccaagtatcacactttaatgtacatgggccgcaccataatgagatgtgagccttgtgcatgtgggggaggagggagagagatgtactttttaaatcatgttccccctaaacatggctgttaacccactgcatgcagaaacttggatgtcactgcctgacattcacttccagagaggacctatcccaaatgtggaattgactgcctatgccaagtccctggaaaaggagcttcagtattgtggggctcataaaacatgaatcaagcaatccagcctcatgggaagtcctggcacagtttttgtaaagcccttgcacagctggagaaatggcatcattataagctatgagttgaaatgttctgtcaaatgtgtctcacatctacacgtggcttggaggcttttatggggccctgtccaggtagaaaagaaatggtatgtagagcttagatttccctattgtgacagagccatggtgtgtttgtaataataaaaccaaagaaacata

SEQ ID NO: 150 - DNA, 1399 bp, Homo sapiens
ccggcccggaagtgcgcaggcgctggcaagatggcgggaggggtgctcccgctgaggggcctccgcgccttgtgtcgcgtgctgctcttcctctcgcagttctgcattctgtcgggcggtgagcaatcgcaggcgctggctcagtcaataaaggatccgggcccaacacgcacattcacagtagttcccagggcagcagaaagtactgaaatcccaccttatgtgatgaagtgtccgagcaatggtttgtgtagcaggcttcctgcagactgtatagactgcacaacaaatttctcctgtacctatgggaagcctgtcacttttgactgtgcagtgaaaccatctgttacctgtgttgatcaagacttcaaatcccaaaagaacttcatcattaacatgacttgcagattttgctggcagcttcctgaaacagattacgagtgtaccaactccaccagctgcatgacggtgtcctgtcctcggcagcgctaccctgccaactgcacggtgcgggaccacgtccactgcttgggtaaccgtacttttcccaaaatgctatattgcaattggactggaggctataagtggtctacggctctggctctaagcatcaccctcggtgggtttggagcagaccgtttctacctgggccagtggcgggaaggcctcggcaagctcttcagcttcggtggcctgggaatatggacgctgatagacgtcctgctcattggagttggctatgttggaccagcagatggctctttgtacatttagctgtggtgtgtgcttcagaaaggagcagggcttagaaaaagcccttttgtccgtaggagttgatgtggtgtgagtgatatatttctatgtttttaatgtacagcatctgtactttgtttgccttgataaaggtaagataaatgaaacgctgaactatgctaatctggaatttgtttttatttgcctgaaatatatttttttctgtgaaaaaattaaaacgtacttaagccaggagaatgaattatacagtgattgaaaatccatttaattcctatgacttttgttttgtattgcccaagtcaaactacatcacttgtatctccagcccaaatgtagtctgccttgaaaagtctttcagctgtgactgcaggaagtgggagtgtttttattgttagctaattgctgtgactgcaggaagtgggagtgtttctgttgttggctaattgaagttattaggctcagcttcagtcatgtgtaagttttgcagtgtaatacatatgtagtctggtctgtatatatgaaaatttgaattaaactgcagaatgtttatgtctagttatggtttaaattttcttagtagtatataaaaggtaagagtactgaaaaattaataaaattgcaagtt

SEQ ID NO: 151 - DNA, 2473 bp, Homo sapiens
aatgtagccaaggttactaatgcatagatatgttatgcgtatacaaggatgtacacatatattttgtaaatataagtatacataaagagcttctactaatttttttctactacataatattctgtgtagatatattataattttttaggcagtcccttatttgtgaacatgtaggttgttcctaatctttttcttttgtaaatgatacctattttgcacatttgtgagtatacctgtagaataaaatcatagggctagaattgctgagttaagaggtatatgcattttttatttttatgttttttagagatgaggatctcactatattacccaggctggcctcaagcttctgggcccaagtgctaccatagataccactgcactccagcctgggtgacagagcgagacactgtctcaaaaaaaaaaaaaaaaaacagatgaaaaaagaaacaaagcagaaccaaagctatccctagagtttagtaaatggcatcccacacttgtgctttagagaggcccagtgctgctaaagaagtcaagaaatcagaattggaggaaagatgatatcatttgtcaaaatcctttttttttttttttttttgtgatggagtctcgctctgtcgccaggctggagtgcagtggcatgatcttggctcacggcaacctctgcctccctggcttaagggattctcctgcctcagcctcctgagtagctgggactacaggcgtgcgccaccacgcctagctaatttttgtgtatttttagtagagatcgggtttcaccatgttgcccaggatggtctccatctcttgacctcgtgatccacccgcctcagcctcccaaagtgctgggattaccggtgtgagccaccacgctgggccattaaaatcttatcagtagcttactacatatattcagcccataaatactcccttcaccctgtcgtgttgtcagatgtctaccattttatatatatattcttctgattgattttttccgttctcttttccattgatgttcattatagcatgatttattcttgatgaaagcattaaagatgagaatgatacgatttgtcccttcccgttctacccttaaggccttgctggtccttatttaattacatcttaagagtcttcttatttttggacttaattcaaaagcctgttattctgatagaggtgacaggtagctagtaagtgtgtttggtggcaaattaaagtatccttggtttttaagctttaccataatgtgcatagataactaagagtttactctaatgctattgattatggtagatgtatttaattgtttgtatcctgtcccaataaggattggagtaatcttgattatattgttcttttgaatatacatatataaaaataatatatttctcattatttattttatttttagcttatgtccctgatgccaaaaatgcacctactctttcctctaactctggtgaggtcattctggagtgacatgatggactccgcacagagcttcataacctcttcatggactttttatcttcaagccgatgacggaaaaatagttatattccagtctaagccagaaatccagtacgcaccacatttggagcaggagcctacaaatttgagagaatcatctctaagcaaaatgtcctatctgcaaatgagaaattcacaagcgcacaggaattttcttgaagatggagaaagtgatggctttttaagatgcctctctcttaactctgggtggattttaactacaactcttgtcctctcggtgatggtattgctttggatttgttgtgcaactgttgctacagctgtggagcagtatgttccctctgagaagctgagtatctatggtgacttggagtttatgaatgaacaaaagctaaacagatatccagcttcttctcttgtggttgttagatctaaaactgaagatcatgaagaagcagggcctctacctacaaaagtgaatcttgctcattctgaaatttaagcatttttcttttaaaagacaagtgtaatagacatctaaaattccactcctcatagagcttttaaaatggtttcattggatataggccttaagaaatcactataaaatgcaaataaagttactcaaatctgtgaagactgtatttgctataactttattggtattgtttttgtagtaatttaagaggtggatgtttgggattgtattattattttactaatatctgtagctattttgttttttgctttggttattgtttttttcccttttcttagctatgagctgatcattgctccttctcacctcctgccatgatactgtcagttaccttagttaacaagctgaatatttagtagaaatgatgcttctgctcaggaatggcccacaaatctgtaatttgaaatttagcaggaaatgacctttaatgacactacattttcaggaactgaaatcattaaaattttatttgaataa

SEQ ID NO: 152 - DNA, 1966 bp, Homo sapiens
acgggccgcagcggcagtgacgtagggttggcgcacggatccgttgcggctgcagctctgcagtcgggccgttccttcgccgccgccaggggtagcggtgtagctgcgcagcgtcgcgcgcgctaccgcacccaggttcggcccgtaggcgtctggcagcccggcgccatcttcatcgagcgccatggccgcagcctgcgggccgggagcggccgggtactgcttgctcctcggcttgcatttgtttctgctgaccgcgggccctgccctgggctggaacgaccctgacagaatgttgctgcgggatgtaaaagctcttaccctccactatgaccgctataccacctcccgcaggctggatcccatcccacagttgaaatgtgttggaggcacagctggttgtgattcttataccccaaaagtcatacagtgtcagaacaaaggctgggatgggtatgatgtacagtgggaatgtaagacggacttagatattgcatacaaatttggaaaaactgtggtgagctgtgaaggctatgagtcctctgaagaccagtatgtactaagaggttcttgtggcttggagtataatttagattatacagaacttggcctgcagaaactgaaggagtctggaaagcagcacggctttgcctctttctctgattattattataagtggtcctcggcggattcctgtaacatgagtggattgattaccattgtggtactccttgggatcgcgtttgtagtctataagctgttcctgagtgacgggcagtattctcctccaccgtactctgagtatcctccattttcccaccgttaccagagattcaccaactcagcaggacctcctcccccaggctttaagtctgagttcacaggaccacagaatactggccatggtgcaacttctggttttggcagtgcttttacaggacaacaaggatatgaaaattcaggaccagggttctggacaggcttgggaactggtggaatactaggatatttgtttggcagcaatagagcggcaacacccttctcagactcgtggtactacccgtcctatcctccctcctaccctggcacgtggaatagggcttactcaccccttcatggaggctcgggcagctattcggtatgttcaaactcagacacgaaaaccagaactgcatcaggatatggtggtaccaggagacgataaagtagaaagttggagtcaaacactggatgcagaaattttggatttttcatcactttctctttagaaaaaaagtactacctgttaacaattgggaaaaggggatattcaaaagttctgtggtgttatgtccagtgtagctttttgtattctattatttgaggctaaaagttgatgtgtgacaaaatacttatgtgttgtatgtcagtgtaacatgcagatgtatattgcagtttttgaaagtgatcattactgtggaatgctaaaaatacattaatttctaaaacctgtgatgccctaagaagcattaagaatgaaggtgttgtactaatagaaactaagtacagaaaatttcagttttaggtggttgtagctgatgagttattacctcatagagactataatattctatttggtattatattatttgatgtttgctgttcttcaaacatttaaatcaagctttggactaattatgctaatttgtgagttctgatcacttttgagctctgaagctttgaatcattcagtggtggagatggccttctggtaactgaatattaccttctgtaggaaaaggtagaaaataagcatctagaaggttgttgtgaatgactctgtgctggcaaaaatgcttgaaacctctatatttctttcgttcataagaggtaaaggtcaaatttttcaacaaaagtcttttaataacaaaagcatgcagttctctgtgaaatctcaaatattgttgtaatagtctgtttcaatctt

SEQ ID NO: 153 - DNA, 18478 bp, Homo sapiens
ttgtttattttgtttttagtttttggggtccccgtgctgctgcaaggcgaaacgggagggagtgacccctgcgcccctcagtcccccctacgacgtcgcctccatagtctgcggagaagcggagactgcgcgcctcgcctcacagcgaaacgccgcgcactcggagccggcacggctcggcgggttgtggttttttgcactgaatgtaacctagactcatcttcacgggcttgtgttgccccaggtactgtcaaaggcagtatttttgtgtttctgcagagttttgcacaaaatctgttcccatgcaaaccaatgagggagaagtatcggaagaaagcagttccaaggtggaacaggaggattttgtaatggaagggcatggcaagactccacctcctggtgaagaaagcaaacaagagaaggagcaagaaagggaagaacagttaatggaagacaagaaaaggaagaaagaggataaaaagaaaaaagaagccactcagaaggtcacggaacaaaaaaccaaagtgcccgaagtgacgaaaccaagtttaagccaaccaacggccgccagcccaattggcagctctccatcgccaccagtcaatggtggcaacaatgccaaaagggtggcagtgccgaacggacaaccgccaagcgccgcccgctacatgcctcgggaggtgccgccgcgattccgttgccagcaggaccacaaagtgttactaaaacgtgggcagccccctccaccgtcctgcatgctccttgggggtggggcagggcctcctccctgcacagcacctggagcaaacccaaacaacgcacaagtgacaggagcgctgctgcagagtgagagtgggactgcgccagactcaacccttggaggtgctgctgcttcaaattatgcaaattccacttggggctcgggagcctcctccaacaacggcacctcccccaacccaattcacatctgggacaaggtgattgtagacgggtctgacatggaagagtggccttgtattgccagcaaagacactgaatcttcttccgaaaacaccaccgataacaacagtgcctcgaaccctggctctgagaagagcactctgccaggaagcaccactagtaacaaaggaaaagggagccagtgccagtctgcaagttctgggaacgaatgtaatcttggggtctggaaatctgaccctaaggctaaatctgttcaatcttccaactctactacagagaacaacaatggactaggaaattggaggaatgtgagtggtcaggatagaattggacctggctctggcttcagcaactttaacccaaatagcaacccatctgcctggccagcactggtccaagaaggaacttctaggaaaggggcattggaaacagataatagtaattccagtgcacaggttagcacagtaggtcagacatccagggaacagcagtcaaagatggaaaatgcgggtgttaattttgttgtctctggcagagaacaggctcaaattcataacactgatggaccaaaaaatggaaacactaactccttgaacttaagttcaccaaaccccatggagaataagggaatgccctttggaatgggcttggggaacacctccaggagcactgatgccccttcacaaagcactggagatcgaaagactgggagtgttggatcttggggtgcagctagggggccttctggaactgacacagtctctggacaaagcaattctggaaacaatgggaacaatggaaaagagagagaggactcctggaaaggagcttctgttcagaaatcaactgggtcaaaaaatgactcttgggacaacaataacaggtctacgggtgggtcctggaactttggcccccaggactctaatgacaacaaatggggtgaagggaacaaaatgacatctggggtctctcagggagaatggaaacagccgactgggtctgatgagttgaaaattggagaatggagtggtccaaaccaaccaaattctagcactggagcatgggacaatcaaaagggccaccccctccctgaaaaccaaggcaatgcccaggctccctgttggggaagatcttccagctccacaggaagtgaagttggaggtcaaagcactggaagcaaccacaaagcaggaagtagtgacagtcataactctggccgtcggtcgtacaggcccacacatcctgattgtcaggctgtcttgcagactcttttgagccgaactgatttggaccccagggtgctctcaaacactggctggggccaaactcaaattaagcaggacacagtgtgggacattgaagaggtgccaaggcctgaggggaaatctgacaaaggaactgaggggtgggagagcgctgccacacagaccaagaactcagggggctggggagatgcacccagccaaagcaatcaaatgaagtctggatggggggagctctcagcctctacagagtggaaagaccccaagaacacaggaggctggaatgactacaagaacaacaactcttccaactggggaggaggacgacctgatgaaaagacaccttcctcttggaatgagaatcccagcaaggatcaggggtggggaggtggacgccagcccaatcaaggatggtcttctggaaagaatggttggggggaggaagtcgatcagacaaaaaacagcaattgggaaagttctgcaagtaaacctgtgtctgggtggggtgaaggagggcagaatgaaatcgggacttggggtaatggtggcaatgcaagcctagcttcaaaaggtgggtgggaggattgcaaaagatccccagcatggaatgagacgggccgacagcccaattcctggaataaacaacaccaacagcagcagcccccacagcagccgccgccaccacaaccagaggcttctggttcgtggggaggcccacccccaccacctccaggcaacgttcgaccttccaattccagctggagcagcgggccacagcctgcaacacctaaggatgaggaacccagtggttgggaagagccatccccacagtcaattagtcggaaaatggacattgatgatggcacttcagcatggggagaccctaacagttataactacaagaatgtgaatctgtgggataagaattcccaagggggcccagcacctcgagaaccaaacctgcccaccccaatgaccagtaaatcggcatcagtctggagcaaaagcacaccacctgctccagataatggtacttccgcttggggtgagccaaatgaaagcagtcctgggtggggcgagatggatgatacaggagcatcgaccacaggctgggggaacacgcccgccaacgctcccaatgccatgaagcctaattccaaatctatgcaagacggctggggggagagtgacgggccagtcacaggagctcgccatcccagctgggaagaggaggaggatggaggagtctggaacaccactggctctcagggcagtgcttcctcccacaactcagcaagctggggacaaggaggaaagaaacaaatgaagtgctcactcaaaggaggaaacaatgattcatggatgaatcctcttgccaaacagttttcaaatatgggattgctgagtcagactgaagataatccaagcagcaaaatggatttgtctgtaggaagcctttcagataaaaaatttgatgtggacaagcgagcgatgaatctcggggattttaatgatatcatgaggaaggatcgatctgggttccgtccacctaattccaaagacatgggaaccacagatagtgggccttattttgagaagctgactttgcctttctccaatcaagatgggtgccttggggatgaggctccctgctctcccttctccccttctcccagctacaagctgtctccctctggttccacactacccaacgtcagccttggagcaatcggcacagggctcaacccccaaaacttcgctgctagacaaggcggtagtcatggtttgtttggaaacagcacagcacaatcgagaggtctgcacacacccgtgcagccactaaattcttctcccagtctccgggcgcaagtgcctccccagtttatttccccccaggtttctgcctcaatgctcaagcagtttcccaacagtggcctgagtccaggtcttttcaatgtggggccccagttatctcctcaacaaattgccatgctgagccagcttccacaaattccccagtttcagttggcatgtcagcttctcttgcagcagcagcaacagcagcagttgttacagaaccagagaaagatttctcaagctgtacgccaacagcaagagcagcagctggctcgaatggtgagtgcactgcagcagcagcagcagcagcagcagaggcagccaggcatgaagcactcgccctctcatcctgttgggcccaagccgcatctggacaacatggtacccaacgcattgaatgtggggctcccagaccttcaaaccaaagggccaatacctggatatggttctggcttcagctctggcggcatggactatggcatggttggtgggaaggaggctggaaccgagtctcgctttaaacagtggacctccatgatggaggggctgccctctgtagccacacaggaagccaatatgcacaaaaatggcgctatagtggcccctggtaaaacccggggagggtcaccgtacaaccagtttgatatcatccctggtgacacactgggtggccatacgggtcctgctggtgatagctggttacctgccaaatctccaccaacaaataaaatcggaagtaaatccagcaatgccagttggcctccagaattccaaccaggagtgccatggaaaggtatccaaaacattgaccctgaatctgacccctatgtcaccccaggaagtgtgctggggggtacagccacatctcccattgtagatactgaccaccaactgctgcgggataacaccacagggtctaattcttccctcaacacctcgctgccttcacctggtgcctggccctacagtgcctctgacaactcctttaccaacgttcatagcacttcagcaaagttccctgattacaaatcaacatggtccccagatcccataggacacaaccccactcatctctccaacaagatgtggaaaaaccatatttcctccaggaacactacaccgctgccccgcccacctcctggtctgaccaaccccaaaccatcatctccctggagcagcacagcaccccgatcagtcagggggtgggggacacaggactcacggctcgcctcggcctctacctggagtgatggtggctcagttcgtcctagttactggctggttcttcacaatctcaccccacagattgatgggtcaaccttgagaacgatctgcatgcagcatggcccactgctgacattccatctgaatctaacccagggcactgccctgatccgatacagcaccaaacaggaggcggccaaggcccaaactgcactgcacatgtgtgtgttgggaaacactaccatccttgctgagtttgccactgatgatgaagtcagccgctttctggcacaagctcagccccctacacctgcagcaaccccaagtgcgccagctgcggggtggcagtcgctggagaccggccagaaccagtcagatcccgtgggacctgctctgaatctttttggtgggtccactgggctcgggcagtggagcagcagcgctggtggcagcagcggggccgatcttgctggcgcttcattgtgggggcccccaaactattcttctagcttatggggagtcccaacggtggaagatccccataggatgggcagccctgctcctttactacctggtgaccttctgggaggagggtcggattcaatctgaacttagaactttcaactctgacctcgtgaccttttttggaacagcagcagcactaacttgaccttttcgttttttttttcaacttgcaataaatacatttttaaaaggaaaaaagaaaacggagagaaaaaaaggtgggtcattgacagactgtctgagcacatagttgcctcccttataacttcagttttttcgtttggaatatgaatccaaaaagagaacatatcactcttgaaatacttgaatcatgaacgccaacctagaaagacaatgtgaagcaagtacacataccatttaaatttaaacacaaaaaaattaaaaaaattagtttctagtttttcacttttttcatgttatatggaagttgttgctaagaaacatatatactgaaaaaaaatagctttttaactttgtttgcactgggtgtgtttccgtccttaggtctaccatgtttgggagggagggaaattcaaaagaattgttgggggaggggggagggaagacttgacggagcctcactttaaaaacaaaaacacaaaaaacctaaaaaaaaaaaaaaggaaaaaatttgtgattggctggttgataaataccagtgtgttctggcacatgtaactgcccaggcatgctcgttctggtgtgtgtgtgcacgtgtgttcatgtgcattcgcgtgcatccttctctgtctctgtgtgtgtgcctgtgttcttcccttctcccctgccccaccctgacttctcagaaagctgcatcgctgacagtctgcaggctggctggccggcccatctgctttttattttatttttttaactatgagaacacacaggcccggagagccactgctactaaagcaactccattgggctgcattaagatgaacagagtgctttttaatgatgaaagcagggagctcctttccatttgcaacttagcctgaatgtggggtttctctggctgttcttttgacctagcagtagagtggagcactgccaagtccaaaaaactagagcaggaggtacctcttggagcaacggtgtgtttatttctgtttttttttttttttaagtgaatggccaccaggcacatctgagtatctgttaagtttcatgcaggccttttcgttagtttgaaatgggaacggaagataacttttgatgatgcgatgtctcaaaaacagagaaactttgttccctctttccttatgatcaggtttgagaaattcttcaaaaaattaggtgaagttgagttacatatttctgttggttggttctctttttcattttatgaaaacagaaaagaataagtggtgagcagcctcctgaaagcatctgcagctactccctctgctcctttctcgccgagcgttacctgtgccaggccgtggcgcgttacagcaccaggccatcactgacagaaacgtttacttaacgaatgttcttaaaccagtgtgtacttcaagcgtttccttttgtttctctgtgttgtgtatttcctgtgtatgtggttttgcttaggcaggtataacttagcgaagacttttaagtattgcacctttttttgatttttgacctcttccccccaccttgtaattttgcttttttaatttcggtatttaaatacttttttttttttttaagcatcaatgtagtagtactctgggccgaacaggggtcaacgtttaatctacagttatcaccaacatgtatgtacttatgtcggaatcaaaatgtatcaaactgcttattgtgaagagaattatagcagacctgaagggggcgaaaaaccagatagggtggggggatggatgccggtgacgtgctagcacttgtgtggacatcccagtctgcattatgctgtttaacataaagtgccgacattttgtaccagcaaatacctgcccattccaacccttggtgggagcagacctctactgtcctctgtaacttgctgctattgaggacaagggagtttttctttctttagcgtcttcagtgaaggatacaatacaacaatgcctaatgtatttgactttttagcttgtgtctgtgtgtaggtgggtgggtgggtgtgtataggaaaagcctaaaacaagttatttgcatttcagtggttttgtgagacaaagaatgggaaattctgtagcccttctggcttaccctgttgattataaacctagcctcaaaagagattgacaggcatgactcaagtgagtgttcacatatacaagcctgcatgagccctctgtgggtaggtggtcacacttggcatctgcagcattgacgtggccccgctgggtgccttgagcatgccctcttcctgctctgcaatttgaatcaccaccgtgccccttccaccactgttccccatgcaaaagctctgcttccagcagcccccactgaccgctctctgtgtggagcaaagtgctgtcgtgcggtgaccaccaggtgaagagcagcttgtattcagacatctagagaaggttaaatcttagtgtccctgggccaggagcatatcccaaggctcctgcgagccagtggcgaccctgtccactgccgctcttggttcactgctgtgtcctgccccaccctcctctcctcctgcctgttggttccttgacctgcactatgggttagttgagttccttacgatactacggtgaaagccgggtgctagagcccctcttgtttacaagacataatgagggatttgaaatatgtaaaaataaacatgagaagctaaaatgttcttccatcataagcttaaagggaaaaaaactaaaaactttaaaaaaaaaagaccaaaaagtgcgtatatatatacatataaatatatattttagatgaagactaactctgggagcatttaacagtgttttttgtttctgtttttaacatttgttttcctgctttaaaatttgcaagcattctcaggaattctagggtaggaagccagttttttgaagatggtttatttaaccatatcttatcctagagagatggctgtttctttcctgttaataaacttttacaagttcctgaaacttcagaaagtttaaacaatttttacttaaaaaaatgtaaaaagaaaagtctccaaacattattgtcatactggggatcacacattttaaaacacatagaaatattttttaaaaattatcaatttagcagcaacaggtaaattcattatcttaaaaatatgggagaaggattaagctttgtaagagctcgatcatggattcttttgaaattgtgtgtagtttaatgggagagtgtttggtgtatatagatgagaatgccatcactttgttcctttccatttgagactgaactgaaatctcccctagtaatttttatttttttaaaggaacccttctccttgtccccacaaccccagcaacaaaagaaaggaaggaaggaagaaacaacagcttaaaaaaaaaagtaatctgtaaaatagtacagttggattgctgagaatctatgtaaagagttaggaaatataggttaataatttttggaacaaattttaaatataggcattactagaggaaaattatctatggactgtcctattaatgaagaatgtctgtcttacctccgtttgttttgggaggaggagaaaatatagaagaatctaataaggaacaagtgattttacttttttagctcccagctactgttgtgctcgttttaattgctgttttgaagatctgctgcttaattatccccatcccttagccggagatgtggagtgtttcctttcagtttttggtgatgttgaattcttttgtattccctcctggggccaggggtcagaattcccaagcatgaccacagcttcttttaaacattaagcttcccagtgggaaggaaactccagctcgacaggtaaagggagtgggtggggttgctgcctgcaatttctctaaaaccgctttagtgccttcgtacatacacccagacatcctgagcaagggggacgcacatgtgtgtgtgtgtggtccagtcactccacagatgtaagatactcacccataaaggaaattggagtggttctggacaggccccaaaggcagtgggctgaatttaaaataaataaacaaacgtcaagcaagttaatatgcttatgtctcagtaatgtagaatgccaagttccttcctgtgtcgtgtgccctccattactgtgcattgattcctccaggtgtgtaattgtgacaactgcagtgatttggaaagtctctttgtcttgggcaaatagaaggggttcctgttgttctgctcttgtccttcgtctcctccccttttcccccagacctcccccttctttttgtcaacttgctgggagctttgctttattggttggcagtgacctaagaacaggatatggtgaggatgtcatggaagagaagagctctttccgtggtattctttggcaagagccatgtctactaagaggttagatgacttcagtatacttataaaattcagtgagagtgccttcttctcttctaccacactctggcatagatacaggcttgctggtcacctctcattacatagatttattttaaaaacattttgattatgttaatttgagctttcccttttttttttttaactactttttaaaacacttgattactagtggcttagaggtgtgtacatctcctgaacatcacaaacttggtttctacctaccacacgagtagccaaaagaaaagaagcactaatagagaaaggggtgtctcacaccagacagaggacctctgctgtcaattagatccagtatcatgacctaactttaagtgtggaaaagagttcagatctctgagacactgtgaagaaatggatggctcatgtaacatctctgatccctcagtccccaaccctggacgtgtttcatttacaacattcataggagttaacttagcagtgttgcaagttaaggttccaaaccaaattatttaatcagtgtccccccaataaatcacttatccatttattgctagttagttttatttatagcaacttgatttcctatgagtatggctcctgttgtaagaattttcccacctcttctgacatgaatgtagcataagttagcaatcggttcttccaaactcctgtgggttgaatatggtatagaaggtatgcaagaggaaaaagaaaggaaaagataaaactcctgcctgagaatttggaagcacctttattaacacatatatctcgcagaaactagaagctcataggctgttaactttttgcaactattcactcatttttaccacttttttttttgggtgagggggtgatttttgtaaggttaacagccagattccattttgacctcagatgctgtgtactttttaatttcattttttatattctgccatcttgactcttctctaaaacagaatgaaaatgtctgcatgctgagcaaaatgcttacgccaagcctgtttttctctgcagagtaaacaggatgttttcagcagacttggctctaatagccatctctaagattagggaacaattgagtctttatgtagaaaagatccattttttccccatcctcagagttaaaattcaacatttaaagctttatcggttattgttttagatttgagatttttgtttttaagtatctataagatctttagaagtgagataaatttttcgctggttaaaaaaaatcaaactttcctctgcagtgtttttgccaagttttgtcacacttcatgtgtatgcattaactatacttcttagtgttactgcaaaaaaaaaaaacaaaaacaaaacaaaaaaaagccttgttctttaattgtgtttttcctcctgtgagtggacaactaaagccgcgtgatgatgcggatgaaaatattctggtctgtgtgtatacaatgaattgtcagtcttcagacctcatggtcgttaagaaaatagggaactcacaaaccctgctgcgcactacatttacttctttatctgcaagtacagggagtccatacagtcaagaaacacacagatacacataatgctattgaggacattgtcattctgtaagaaaacagaatattatctagatttccagagttagtgcagaccctgtgataacagtctgtgggtttgtggccagcgccaaaggtgtgtgtattttcagaaatggtccctatttgtcagtgatagtgttttttttttcttaagtttgacaaagggggtggtaatatcacattctttagatttgaaataattatcagctccaagaatctgtgaacatagtaataacaataaaaattcaacatcgaccctccctaacctgctcaccatacctccccaccccatgcctctgaagaaagaggccatgaacctacgaggtggtaaagggggacacaggtcagggagtggagagctactcctccagcagctcagcacccacactgcccgcatgcgtgtggccaccgggaccagatcccgagtgattgtggcatacccctaatatttgagtagtttttaagctgtcagtctcttgtcataacctcctaccgccacccaaaaaagtaacgaaagttgcagtaactgccagtgtttgcctcaccaaatttaaatcgttcccttttcagttagctatatacctgaatttgtttttaacaagaaactgtacatggccaggaaaaatggtactaccttggccaaagggtctttgcaaaaagctcagtcttcagttcttcactgtgacaaatgcttatcttgttcatgggaggggaaagatcagataaataggcaagaagtactctgttttaaataaagaataaatagtgtccgtttaaagcactttgtgcctcaacttcatttttaaactgtaaatcattgctttggaaataaattcccaattataattgacccatatctagccaatatcaacaagttgggatggtttttgtttttttcttttttttcaaaaagggaaattcctctttactgctcacagtaagctgcaaaagaaagttgtcaaggtggcttatgatgctgttgtagcagagctgtgaaaggaagtgctttgctttctctcccgccttccggaatctggcgttccttccccttcggctactgaaaggtgtgtacaactcccagaggggtggctgtaaaagttgactggaggcaaagtggagtggccttattgccaggactagccctacagaagagctttacagagaggaggacagtacatcctatgtgtgttcgccaaaaatgggaaaggtgggtatttaggcaaaacaaaataaaaacctttggaaccctttaagaagttacataccttttaaaggtagtatagtttctcaccaagtgatgcattttagcatgacacttcttgccagaaattttgggataagttggaataaatgtgtttaaaacatcatccaccgccctttttaaattttgtctaaggaattacttaagtatagtatttctgaatgtgcctttgtgagtacagagaccgtccgttctaggaagaagctatccgttggatacaaacaaacagacggtcagctttagtcattagggaagtcaaagttcctcctggaagtcccaggagcagctgttgagatttcattagcatcaatattgcacagtgtagagttgagtggaagagattctgggacttgggagaggagacaggggaaggtacccaggcgacgcagacccacgttagtccaagagcgcaggtttacacatctgcattccctagttttctccgtctgtatgtttgtgctcatgtggctttggctgttttgttttttgtttttctgtaagcactggagaattggaatatggtgatacttgtgacacattcatgcatgtaaacaaggcattttccagcttctgccgtgtgcagagcgggcagcacgcttttaccctttgagtctgtgtcctgaggcggccattacattcccacatgggcgtcacatcacgttgctgttgatgcaaacagggtattacacacaaggaaaaggggttttgaagagttaagattgaagtgtttgagaaagaaaagagaaaaatctgaaatcatattttatttcttcagagctattatagttgaacacagaaatctgcagtgtctttatttgtttttatgttttaaacaatttcacctcttctccccactcctatcttctaaagaaatatcaagcaaatgctaagggccatttccatgattcctcagagctcccccaaagaggagaacagtccctcccactcgattccttcagcttcattcaggaagacacagggaggagagatgctgcttctgcgctttgctctcattcctctctcatggccttgaaatgtattattatgcaaatgtgaattttgatactgaatttaagaagaggttgttggatttttttttttttttttttttttttcaaaaaaaaaagtcccacatgtggtcatcgtcgcttctttatgttgtaaggtgaattgtaactatgcattctgcaaagggggtggggaggagagggcagaaaggggaagggagtagcgttgcatccttgttcttcagtttctgtgtccatggtgtccccgtgtcctggaggggaaggggagtgagagacgaatgtggtaaggtcagcacagtgagatagagacctctgagtcctcttgccactgttgctggcaggtctgatggccaggtaaattccagggggcctgcagttcctgtcaaccaatgtggttcaggattcttgatcctagccgtgcagtgttaatccagtgcagcaatggaactccacaggctccagtgttctctggaaaaagtactcatcctttcctgaattcagagcccttcaagctcaggaaaccacgcttcactcgtgctgacctgaaagttaatctttaggtcgattttgaaaaactccgcctcctctctcctttttaatatttctttcttcctttttaatcatgtttaagtgaacttactcttagttataaggaactgtcctgctttgtggggaagagggctgttgcttgtcaggcaaaaaagttttctcttcctacccaccatccctctctctgcttcccttgcatttggcaggctgtatgaagccaatgagctgcgaggtgttttgacaggggaggtctgcatgcagcctcttctttgtcctaacaattcctttgttgatcttgcctgtgatgaatcatagcgcctgcattgctctggtctaggcattatttgcaacacacagtatcgtaagcgagagattgttctgcctatattcagtgttttccatgcagcaattcttcttgttgacgttcacagtactgtaacgagtaacagacttgatcacagtctcctcgtgcctgtgcagggctgcacaggcatgatcttatcagggttccaatctgttagattgcctttaaacaaaaaaaacaacaaaaaaataaaatcctgacgtttcaactgtctcacacaaaataatacctcgaggtacatttccccctgcaatgtaaacccttaactcctctctcctttctgacatcagtggattatcctttttaaaatatgaacatgtaaatagcaggataactttaaaaaacattttctttgctgtgaaagtaaccctaaaatatgttttcttcttttgtatttttttggtttttgtttttaagccatcagaagtttcagatctttactctttcatgtttaagaagaaagagcagaggaggtcgggggagccggtttgcatttgtgttggaggggtgttatctccattgcctcccacacagtgacagcagaccagtatgtaaaccctgtcttggctgggcgcggtggctcacaccagtaatcccagcactttgggaggctgaggcaggcagatcatctgaggtcaggagtttaagaccagcctggccaacatggtgaaaccccgtctctactaaaaaattagccggacgcagtggcgcgcgcctgtggtcccagctgctcgggaggctaaggcaggagaattgcttgaacccgggagacggaggttgcggtgagccgagattgcaccactgcactccagtgtgggcaacagagcaagacttcgactcaaaaacataaaataaacaaaagacacacacacacacaaaaaccctgtcttaaatagctgccatctcttccagcaatctagtgccagggtaagaagtgtctgaatttctctcttccagcagatccatcccctgcagggactccagaatgttctccacacaatacctggagctctcaacctttcttggttcagacacacacatacacaccccttgagtaactcagtatcattttgtagttcacagaaggatgtagtccctggcattttggtttgcactgtagaatccatagccttgtcactttgttatgctctggaaatgtactgatttcttacttgggaggaaacttgtgtaaggagatgtgcaaaccaccctgaaagccatgtgcatcctcacctcttccattaccccctccatgagctcgaagcgacattaagtagagggaaatgcttttaacaaatgctgctcatgtggatctgtcagctattgcttgcctagatttgggcacccatgaagcagggttggaatggatcattttgaattgcttctttgcagacacccccttcgcccccatctttaagataaaccctttactagtcaagaagcccttttcagttggatctcactgatcttgtatagtgacgacttcctttgaaggaagaagcttgattataagtgcatgcatattatccacccaccttctgatttgggcactgttcaccttggaattttatttattttgtttatctggaggccctttttctatcagtctctgatccctcatgggttctgcctgcccttgtatctcttgtacaatgctcccaaagggctttgctgatctctgcacttctttcctgggacactccccccaccaccaccctttgcacacaccagtgaccaaagtgtatgcagtgatctcacagaagacatcaaaaatggtgcatgcaccgtgaatgtgctcacagagacacgtgcacaagattctgcacccttggccttaatctcagtatgacttaaggtgcaggaacatttttaacaggttttaaaaaaacaaaaaacccttctgggaggaaaaaaataaaaagcagatacaacagctcaactgttcccactcctaactctccactatgtgcttataacttcacattctatgccctccccgccacccacctcatccctgttctgcgtaaccaaaaaacagacaacaaaagcaacctgaggagaggtttctggactattttatctgtctccatttagatggagatataaatgctgctttgggttccataatcctagggggctatgtttacatagtaaaatacatcctaccaaatcaggaaacagtgaataatgggagtcacttcacagagacgcaggaggacctggggggcgtagcagaggaggataggtagagaagtaccattttaattatttgtgacttgtggcttccttcctcctctcctcctccctccacgtctctctttgccccctttagacagaaggtgcagaaaagggcatcaaaaagaggctggattttttaaaaggcagctttccaactttgcacacaaacaggtaacaggaaggtacagcaaaaatcctctcatctgaaacactgtcagcagaaacaaaacctgtaaaaatgactaatcagctgcacatattgatgctctctgcaagttacctttaagtgttttttttttcttatacttgaagttgcttttacgatattattttggtggctttcttttctctctttgatgggcaatagaggaagtagataatgggatttaaggacgcctgggggagaaaagggaggatgtggcattgtctttttttttttttttttttttttttttagcatagaggtttaatcaaactcccatatgttgaaattgctcctcatattactggttttacatggacacagaaactaggcactttagaggtgcacttgcatggcaggctgggcccccttttctatattttattttcctttttagtatagtggtacttaaaatcactggttcacttaaaaaaacaaacaataaaatgttaaactctactaatgtacaaataagctgaaaagttgcattttatgtgtattttttgccatagcaggtactgtatttctcatgctggatttcaaaaaaaaaaaaaaaagtatcaaaaacaaaaaaaactaaagggtggtgttttattggattgtgacaggttgagtaataaggaattaagtcgtcgtcatttcattaaaactgagagatgatgtaatgcatatataagagttttctgaagggttttttttgggcttttaaacagcttatttttgtttttgtttagtttttttattttattttattttggaaagatatgattgtattatgtgcaactcagttgcttacattataactacaaaatatttttgggttcctggaaaaaaaagaaaaaagactaataaatgtgtttggctgctaagc

SEQ ID NO: 154 - DNA, 1101 bp, Homo sapiens
atatgaggttggggagcggctgagtcggccttttccgcccgctcccccctccccccgagcgccgctccggctgcaccgcgctcgctccgagtttcaggctcgtgctaagctagcgccgtcgtcgtctcccttcagtcgccatcatgattatctaccgggacctcatcagccatggtcagtaggacagaaggtaacattgatgactcgctcattggtggaaatgcctccgctgaaggccccgagggcgaaggtaccgaaagcacagtaatcactggtgtcgatattgtcatgaaccatcacctgcaggaaacaagtttcacaaaagaagcctacaagaagtacatcaaagattacatgaaatcaatcaaagggaaacttgaagaacagagaccagaaagagtaaaaccttttatgacaggggctgcagaacaaatcaagcacatccttgctaatttcaaaaactaccagttctttattggtgaaaacatgaatccagatggcatggttgctctattggactaccgtgaggatggtgtgaccccatatatgattttctttaaggatggtttagaaatggaaaaatgttaacaaatgtggcaattattttggatctatcacctgtcatcataactggcttctgcttgtcatccacacaacaccaggacttaagacaaatgggactgatgtcatcttgagctcttcatttattttgactgtgatttatttggagtggaggcattgtttttaagaaaaacatgtcatgtaggttgtctaaaaataaaatgcatttaaactcatttgagagaatgccttttagtttaatgcatatttaaactaaattgatcctgtagtgttcctggagaagctagagcctgattgtaggctactactcatcaattaacttctacagtggagactacttctgggactggaatataaaaaagaatcaaaggttctgattttgagttgcaataaagggaaagaccatgctcatagcagtgccaacatctgaagtgtggagccttacccatttcatcacctacaacggaagtagttaactggaagagattaccaagagaataaaaagagactcattcagtg

SEQ ID NO: 155 - DNA, 1837 bp, Homo sapiens
gccccctttacgtcgtgctctgaggaggccaggagatttctggcggcgccggcgccattttgctggagcctgcgaccgagtgggagtggagtggagcggctgtggttgccgactctttcctcttccccacggtccagtcagcgggttaattaggccatcggccctcgagccgagacttgtctcttatttagttctggggagcgcctcgtcgacatgagtgatgtggaggaaaacaacttcgagggcagagagtctcgctctcagtcaaaatctccaacgggaactcctgctcgtgtaaaatcggagagcaggtcaggatctcgtagtccatcaagggtttccaaacactctgaatcccattctcgatcaagatcaaaatccaggtcgaggtcaaggagacattctcatagacgttacactcgatccagatcccactctcactctcataggagacgatctcgaagtagatcatatacaccagaataccggcggcgaaggagccgaagccattctccaatgtctaaccggagaagacatactggcagcagggcaaatccagatcccaacacttgccttggagtgtttggcctcagtttgtacacaacagagagggatcttcgtgaagtattttctcgatatggaccattgagtggtgtcaatgtggtttatgatcagcgaactgggcgatctcgaggatttgcttttgtgtattttgagagaatagatgactcaaaggaggctatggaaagggcaaatggaatggagctggatggtagaagaattcgggtggattattctataaccaagagagcgcacacaccaacaccaggcatctacatgggcagaccaactcatagtggtgggggtggtggaggaggcggcggcggtggaggtggaggtggtggcagacgtcgagattcttactatgatagaggatatgatcgtgggtatgacagatatgaagactatgattaccgatacagaagacgatcaccttctccttattatagtcgatatagatcacgatcaagatctcgttcctacagcccaagacgctattgataacggaatggttgcaattaaggacattttttttcctcttttttttttttttttttttaattctgagatttccccaagctgtggattcttcctactccttaagaaaaaaactttggtttatttagcatctacacttttgtcagttgtgttgctgttttccacccattttattatactcttaaaagatgtaattgttgtcattttgaacagttaaacatcttgagtataaaaagaaccccaatgttatgttatgctttgtaaatttttttttttgcttttacctagataaacttctagctaatcaaataaggaaagaaactgtctttttaaagcttcttttgtgttagatactgtattagagatctgcatttatcatgagttcctttttttttttaactttatttttgggaaagtaacacatgaagtagttcagtcatgtcaggtttgtctggggtggaatggaacagtcaggtagttgaaagtttttttttagagatgaaaagcttgtgaactcctgtaaaacatgctgtatttgaaatacatctgttaaaacttaaaaactaaagtgtgattttttttgttgttgttaagtttattgaagtttattcccttaatcagtgaaggacaacccttatttattacctagagcagttgtataattcgctgttagaaattttggtattgggacagtggataagcaggttatcacatagcatagaattcttaaaagatacatgtggggaaaagtagtctcaaataaaagctaatttctttg

SEQ ID NO: 156 - DNA, 2446 bp, Homo sapiens
gacagagcaagactctgtctcaaaaaaaaaaaaaaaaagagcaaattttttttccaaggtgatagggagagtccgtggctgatgtctgcactgaccagacgcccctagggggccagcgagggcgggtcccaggtgcagcggatgcagaggagagaggcccgggcgcggcgcgggggatggtgcgatcccgggcccgagggcatcagacggcggctgattagctccggtttgcatcacccggaccgggggattagctccggtttgcatcacccggaccgggggattagctccggtttgcatcacccggaccgggggccgggcgcgcacgagactcgcagcggaagtggaggcggctccgcgcgcgtccgctgctaggacccgggcagggctggagctgggctgggatcccgagctcggcagcagcgcagcgggccggcccacctgctggtgccctggaggctctgagccccggcggcgcccgggcccacgcggaacgacggggcgagatgcgagccacccctctggctgctcctgcgggttccctgtccaggaagaagcggttggagttggatgacaacttagataccgagcgtcccgtccagaaacgagctcgaagtgggccccagcccagactgcccccctgcctgttgcccctgagcccacctactgctccagatcgtgcaactgctgtggccactgcctcccgtcttgggccctatgtcctcctggagcccgaggagggcgggcgggcctaccaggccctgcactgccctacaggcactgagtatacctgcaaggtgtaccccgtccaggaagccctggccgtgctggagccctatgcgcggctgcccccgcacaagcatgtggctcggcccactgaggtcctggctggtacccagctcctctacgcctttttcactcggacccatggggacatgcacagcctggtgcgaagccgccaccgtatccctgagcctgaggctgccgtgctcttccgccagatggccaccgccctggcgcactgtcaccagcacggtctggtcctgcgtgatctcaagctgtgtcgctttgtcttcgctgaccgtgagaggaagaagctggtgctggagaacctggaggactcctgcgtgctgactgggccagatgattccctgtgggacaagcacgcgtgcccagcctacgtgggacctgagatactcagctcacgggcctcatactcgggcaaggcagccgatgtctggagcctgggcgtggcgctcttcaccatgctggccggccactaccccttccaggactcggagcctgtcctgctcttcggcaagatccgccgcggggcctacgccttgcctgcaggcctctcggcccctgcccgctgtctggttcgctgcctccttcgtcgggagccagctgaacggctcacagccacaggcatcctcctgcacccctggctgcgacaggacccgatgcccttagccccaacccgatcccatctctgggaggctgcccaggtggtccctgatggactggggctggacgaagccagggaagaggagggagacagagaagtggttctgtatggctaggaccaccctactacacgctcagctgccaacagtggattgagtttgggggtagctccaagccttctcctgcctctgaactgagccaaaccttcagtgccttccagaagggagaaaggcagaagcctgtgtggagtgtgctgtgtacacatctgctttgttccacacacatgcagttcctgcttgggtgcttatcaggtgccaagccctgttctcggtgctgggagtacagcagtgagcaaaggagacaatattccctgctcacagagatgacaaactggcatccttgagctgacaacacttttccatgaccataggtcactgtctacactgggtacactttgtaccagtgtcggcctccactgatgctggtgctcaggcacctctgtccaaggacaatccctttcacaaacaaaccagctgcctttgtatcttgtaccttttcagagaaagggaggtatccctgtgccaaaggctccaggcctctcccctgcaactcaggacccaagcccagctcactctgggaactgtgttcccagcatctctgtcctcttgattaagagattctccttccaggcctaagcctgggatttgggccagagataagaatccaaactatgaggctagttcttgtctaactcaagactgttctggaatgagggtccaggcctgtcaaccatggggcttctgacctgagcaccaaggttgagggacaggattaggcagggtctgtcctgtggccacctggaaagtcccaggtgggactcttctggggacacttggggtccacaatcccaggtccatactctaggttttggataccatgagtatgtatgtttacctgtgcctaataaaggagaattatg

SEQ ID NO: 157 - DNA, 1699 bp, Homo sapiens
tcccggagagaacgccggtggcggggctggtagcccggcagccgcaggtggggccacgagcgctggctgagggaccgagccggagagccccggagcccccgtaacccgcgcggggagcgcccaggatgccgcgcggggactcggagcaggtgcgctactgcgcgcgcttctcctacctctggctcaagttttcacttatcatctattccaccgtgttctggctgattggggccctggtcctgtctgtgggcatctatgcagaggttgagcggcagaaatataaaacccttgaaagtgccttcctggctccagccatcatcctcatcctcctgggcgtcgtcatgttcatggtctccttcattggtgtgctggcgtccctccgtgacaacctgtaccttctccaagcattcatgtacatccttgggatctgcctcatcatggagctcattggtggcgtggtggccttgaccttccggaaccagaccattgacttcctgaacgacaacattcgaagaggaattgagaactactatgatgatctggacttcaaaaacatcatggactttgttcagaaaaagttcaagtgctgtggcggggaggactaccgagattggagcaagaatcagtaccacgactgcagtgcccctggacccctggcctgtggggtgccctacacctgctgcatcaggaacacgacagaagttgtcaacaccatgtgtggctacaaaactatcgacaaggagcgtttcagtgtgcaggatgtcatctacgtgcggggctgcaccaacgccgtgatcatctggttcatggacaactacaccatcatggcgggcatcctcctgggcatcctgcttccccagttcctgggggtgctgctgacgctgctgtacatcacccgggtggaggacatcatcatggagcactctgtcactgatgggctcctggggcccggtgccaagcccagcgtggaggcggcaggcacgggatgctgcttgtgctaccccaattagggcccagcctgccatggcagctccaacaaggaccgtctgggatagcacctctcagtcaacatcgtggggctggacagggctgcggcccctctgcccacactcagtactgaccaaagccagggctgtgtgtgcctgtgtgtaggtcccacggcctctgcctccccagggagcagagcctgggcctcccctaagaggctttccccgaggcagctctggaatctgtgcccacctggggcctggggaacaaggccctcctttctccaggcctgggctacgggggagggagagcctgaggctctgctcagggcccatttcatctctggcagtgccttggcggtggtattcaaggcagttttgtagcacctgtaattggggagagggagtgtgcccctcggggcaggagggaagggcatctggggaagggcaggagggaagagctgtccatgcagccacgcccatggccaggttggcctcttctcagcctcccaggtgccttgagccctcttgcaagggcggctgcttccttgagcctagtttttttacgtgatttttgtaacattcatttttttgtacagataacaggagtttctgactaatcaaagctggtatttccccgcatgtcttattcttgcccttcccccaaccagtttgttaatcaaacaataaaaacatgtttttttttttttttt

SEQ ID NO: 158 - DNA, 2541 bp, Homo sapiens
agtgcgtgcggcctggcctctttgcgcccggcgggcagcgcgcgtctggggcaggctccgcgcggggctcgggcacaggtccccgctgccgcagccctaccgagtgaagcactgagcgcggcgccgcttcgccatcacctggctctggccctctcaccctagcgtaggggggcactggccaggcagtgaggaccctgagatccatgccctgggagacagaggttgtctcctgtccatgcacccgcgcgcctgccttctaaccttcataccgttgggcagattaattcactggactaggcctctgttccgtgggagttgaaaagatttgacctggaagaaaccctagcgattattcagttaagccgcaaccccaccccctgttttatatagggattccggttcacaatggatgctgataaagagaaagatttgcagaaatttcttaaaaatgtggatgaaatctccaatttaattcaggagatgaattctgatgacccagttgtgcaacagaaagctgtcctggagacagaaaagagactactgcttatggaggaagaccaggaggaggatgaatgcaggaccaccttgaacaagactatgatcagtcctccacaaactgctatgaagagtgcagaagaaataaactcagaggccttcttggcatctgtggagaaggatgcaaaggaacgagccaagagaagaagggaaaacaaagtcttggcggatgccctaaaagaaaaagggaatgaagcatttgctgaaggcaattatgaaacagctatcctgcgctacagtgagggtttggagaagctgaaggacatgaaagtgctgtacaccaaccgagcccaggcttatatgaaacttgaggactatgagaaggcactggtggattgtgagtgggctctcaagtgtgatgaaaaatgcacaaaagcatattttcacatgggaaaagccaacctggccctgaagaactacagtgtgtctagagagtgttataagaagatcttagaaataaaccccaagctgcaaacccaggtgaaaggttacctgaatcaagtagatcttcaggaaaaagcagaccttcaagaaaaggaagcccacgaactgctggattcaggaaagaacacagccgtgaccaccaagaacctcctggagaccctttccaagcctgaccagatccccttgttctatgctggggggattgagatcctgactgaaatgataaatgagtgcacagaacaaactttattcagaatgcacaatggatttagtatcatcagtgacaacgaggtcataagaaggtgtttttccacagcaggaaatgatgcagttgaagaaatggtctgtgtgtctgttctcaagctctggcaagcagtgtgcagcaggaacgaggaaaaccagcgtgtgctagtgatacaccatgacagggccaggctgttggccgccctcttgtcctccaaggtcctggccatccggcagcagagctttgccctgctgctgcatctcgcccagactgagagcggacggagcctgatcatcaaccaccttgacctgaccagattattggaagcgctggtgtcatttcttgatttctcggataaggaggccaacactgctatgggactgttcacagacttggctctggaagaaagattccaagtctggttccaggccaaccttccaggtgttctccctgcactcacaggcgttctgaagacagatcccaaggtaagcagctcctcggctctgtgccagtgcattgccatcatgggaaacctcagtgctgagcccactacccgaagacacatggcggcctgtgaggaatttggggatggctgcttgagcctcctggccaggtgtgaggaggatgtggacctgttcagagaggttatctacacactcctgggactcatgatgaacctgtgtcttcaggctccctttgtctctgaggtttgggctgtggaggtgagcagaaggtgcctgtctttactaaacagccaggatggaggaatcctgacaagagctgctggtgttctgagccggaccctttcttcctctctgaaaattgttgaggaggccttgcgagcaggagtggtaaagaaaatgatgaaattcctgaagacaggaggtgagactgcatcacgttatgctataaagatactagctatctgcacgaatagttatcatgaagctcgggaagaagtaataagactggataaaagagccccgacaccacccttggagacacggcttgttccaggtaatcagagtcttctggttcaacaagcagaggagctgggattttccatcctaaagaggatgtggccgggatggaactccatcaccatcctgaagccacagcagaggtggcagaattctctggggcctcatccaagtggctgtgtatatcagtagttgctgagtcctattccataatacagcactatggtgtgtttagccattcattggttgaaggacatctgagcggtttccagattttagctattgcaaataaagctgcaatgagcattcatatacaga

SEQ ID NO: 159 - DNA, 1747 bp, Homo sapiens
agcgacacaggcctcgaggctgtctctgacaagtgttcacaggaggtggggacgcctctgcgcgaggaacgaggagctacgggcctgggcccggttattgccatgggcagcggctgccgcatcgaatgcatattcttcagcgagttccaccccacgctgggacccaagatcacctatcaggtccctgaagacttcatctcccgagagctgtttgacacagtccaagtgtacatcatcaccaagccagagctgcagaacaagcttatcactgtctatggaaaagaagctgatcggctgtcctgtgtgcatcgaacacaagaagtacagccgcaatgctctcctcttcaacctgggcttcgtgtgtgatgcccaggccaagacctgcgccctcgagcccattgttaaaaagctggctggctatctgaccacactagaggtctgcaatgagatgggcttgggtttaccgacaggcagagttggggaaggtgttcccatgtctccaaagtcccccaaacctgggaccctgcaaaccagctcaggactcagggcagccaaccagccaggggtcctgggatgtgcccaccatgctttccatgctctgtctagctagagagcagcttcgtgtccatggaggagagcaagcagaagttggtgcccatcatgaccatcttgctggaggagctaaatgcctcaggccggtgcactctgcccattgatgagtccaacaccatccacttgaaggtgattgagcagcggccagaccctccggtggcccaggagtatgatgtacctgtctttaccaaagacaaggaggatttcttcaactcacagtgggacctcactacacaacaaatcctgccctacattgatgggttccgccacatccagaagatttcagcagaggcagatgtggagctcaacctggtgcgcattgctatccagaacctgctgtactacggcgttgtgacactggtgtccatcctccagtactccaatgtatactgcccaacgcccaaggtccaggacctggtagatgacaagtccctgcaagaggcatgtctatcctacgtgaccaagcaagggcacaagagggccagtctccgggatgtgttccagctatactgcagcctgagccctggcactaccgtgcgagacctcattggccgccacccccagcagctgcagcatgttgatgaacggtcagaggagaatttgctggggcatttgggagttacctgagggaagctagaccctttatgtctctcaggagccctggatcatggggcactgccaatccaagcaggcttcctggagatgatgggctacagagacaaaattgaagggagactacaggaaagggttggcctgcctgaaagaaggcctggccagggcgtcaccccgtcctctgatcctcaccctaggaagctgatccagttcgggcttatgaagaacctcatcaggcgactacagaagtatcctgtgcgggtgactcgggaagagcagagccaccctgcccggctttatacaggctgccacagctatgacgagatctgctgcaagacaggcatgagctaccatgagctggatgagcggcttgaaaatgaccccaacatcatcatctgctggaagtgaggctggtagtgactggatggacacattgctgtgggtagtccctcctactaggaggcttgtcatactgtctagaggttgactcttagttctgtaaataaagacatccatttcaaac

SEQ ID NO: 160 - DNA, 3312 bp, Homo sapiens
cttttcttttctccaggaagagagctgtgaccagcagcgtcccttattcgcttggccttggttcctgtttgcactggctacagcagggcactggcccctactgtcaccgccacctacacaaagaccctatctctgagcgctgcagcctactgttcagccccaggtttgaggatggatgccctggacgcttcgaagctactggatgaggagctgtattcaagacagctgtatgtgctgggctcacctgccatgcagaggattcagggagccagggtcctggtgtcaggcctgcagggcctgggggccgaggtggccaagaacttggttctgatgggtgtgggcagcctcactctgcatgatccccaccccacctgctggtccgacctggctgcccagtttctcctctcagagcaggacttggaaaggagcagagccgaggcctctcaagagctcttggctcagctcaacagagctgtccaggtcgtcgtgcacacgggtgacatcactgaggacctgctgttggacttccaggtggtggtgctgactgctgcaaagctggaggagcagctgaaggtgggcaccttgtgtcataagcatggagtttgctttctggcggctgacacccggggcctcgtggggcagttgttctgtgactttggtgaggacttcactgtgcaggaccccacagaggcagaacccctgacagctgccatccagcacatctcccagggctcccctggcattctcactctgaggaaaggggccaatacccactacttccgtgatggagacttggtgactttctcgggaattgagggaatggttgagctcaacgactgtgatccccggtctatccacgtgcgggaggatgggtccctggagattggagacacaacaactttctctcggtacttgcgtggtggggctatcactgaagtcaagagacccaagactgtgagacataagtccctggacacagccctgctccagccccatgtggtggcccagagctcccaggaagttcaccatgcccactgcctgcatcaggccttctgtgcactgcacaagttccagcacctccatggccggccaccccagccctgggatcctgttgatgcagagactgtggtgggcctggcccgggacctggaaccactgaagcggacagaggaagagccactggaagagccactggatgaggccctagtgcggacagtcgccctaagcagtgcaggtgtcttgagccctatggtggccatgctgggtgcagtagctgcccaggaagtgctgaaggcaatctccaggaagttcatgcctctggaccagtggctttactttgatgccctcgattgtcttccggaagatggggagctccttcccagtcctgaggactgtgccctgagaggcagccgctatgatgggcaaattgcagtgtttggggctggttttcaggagaaactgagacgccagcactacctcctggtgggcgctggtgccattggttgtgagctgctcaaagtctttgccctagtgggactgggggccgggaacagcgggggcttgactgttgttgacatggaccacatagagcgctccaatctcagccgtcagttcctcttcaggtcccaggacgttggtagacccaaggcagaggtggctgcagcagctgcccggggcctgaacccagacttacaggtgatcccgctcacctacccactggatcccaccacagagcacatctatggggataactttttctcccgtgtggatggtgtggctgctgccctggacagtttccaggcccggcgctatgtggctgctcgttgcacccactatctgaagccactgctggaggcaggcacatcgggcacctggggcagtgctacagtattcatgccacatgtgactgaggcctacagagcccctgcctcagctgcagcttctgaggatgccccctaccctgtctgtaccgtgcggtacttccctagcacagccgagcacaccctgcagtgggcccggcatgagtttgaagaactcttccgactgtctgcagagaccatcaaccaccaccaacaggcacacacttccctggcagacatggatgagccacagacactcaccttactgaagccagtgcttggggtcctgagagtgcgtccacagaactggcaagactgtgtggcgtgggctcttggccactggaaactctgctttcattatggcatcaaacagctgctgaggcacttcccacctaataaagtgcttgaggatggaactcccttctggtcaggtcccaaacagtgtccccagcccttggagtttgacaccaaccaagacacacacctcctctacgtactggcagctgccaacctgtatgcccagatgcatgggctgcctggctcacaggactggactgcactcagggagctgctgaagctgctgccacagcctgacccccaacagatggcccccatctttgctagtaatctagagctggcttcggcttctgctgagtttggccctgagcagcagaaggaactgaacaaagccctggaagtctggagtgtgggccctcccctgaagcctctgatgtttgagaaggatgatgacagcaacttccatgtggactttgtggtagcggcagctagcctgagatgtcagaactacgggattccaccggtcaaccgtgcccagagcaagcgaattgtgggccagattatcccagccattgccaccactacagcagctgtggcaggcctgttgggcctggagctgtataaggtggtgagtgggccacggcctcgtagtgcctttcgccacagctacctacatctggctgaaaactacctcatccgctatatgccttttgccccagccatccagacgttccatcacctgaagtggacctcttgggaccgtctgaaggtaccagctgggcagcctgagaggaccctggagtcgctgctggctcatcttcaggagcagcacgggttgagggtgaggatcctgctgcacggctcagccctgctctatgcggccggatggtcacctgaaaagcaggcccagcacctgcccctcagggtgacagaactggttcagcagctgacaggccaggcacctgctcctgggcagcgggtgttggtgctagagctgagctgtgagggtgacgacgaggacactgccttcccacctctgcactatgagctgtgacaaggcagccaccctgtcacctagctcaatggagccccggatcccaagccctgcattgtaagcccacagtaggcactcaataaatgcttgttaaaggaaggc

SEQ ID NO: 161 - DNA, 1778 bp, Homo sapiens
acactggggtggtgcttagccggcgccagaccgaccctcgacttcggagaggcagcgcggttcctctgggtgcttccgcctccccttctcctgcttctccagcctcttcggcctcctcgcccgccgcgggaacccgagaccccagtgtatgccccacccctgaccccgctcgcgacatgtccaccccggctcggcggcgcctcatgcgggacttcaagaggttgcaggaggatcctccagccggagtcagcggggctccgtccgagaacaacataatggtgtggaacgcggtcattttcgggcctgaagggaccccgtttgaggatggaacatttaaacttacaatagaattcactgaagaatatccaaataaaccacctacagttagatttgtctctaagatgttccatccaaatgtctatgcagatggtagtatatgtctggacatacttcagaaccgttggagtccaacctatgatgtgtcttccattctaacatccatacagtctctgttggatgaacccaatcccaatagtccagcaaacagccaggctgctcagctgtaccaggagaacaaacgggaatatgaaaagcgtgtttctgcaatagtagaacaaagctggcgtgattgttgaccccgggtacagtttaaagaagctggccataagaaaaatatatattgatgtgtttgtcacctccctactcctgtcattacatttactttattaaaagcaaaataactgttgtgctgtttccatcttccttgccaagttttcctaccccttctaccctctccttaaacatcagaaaacaccctctatgaaatcaaatgtactgtacctgggttacttgcaaaaattactaatgcttcagtttttctgttgtatttcatttccagttttcaggcagttatttttattattgtactttaagcttttaagatgaattgttatacaagaggtgcttatgcttagcttgatgaccaggatgttatttttaacaaaatgattgctgaagtgtttcatcctggctggtccttcacttgtgttggatttagaagtgaatgtgtttggaatatggcctacagagaatagaaacaaatccatgtaaacaattttgaaggaggcatgggagctaaaaatcctgtgatactaagatctcagtcatatgaattacaacgtagtatttactggcaagaaggagaaagttgaaggactcagctaaaggagtacagcaattgtagtaactgacacatcctctctttgcaagctgctgactgggcacactcatgccaagtttcagaattattggtcttctgggtttttgctttttaaaagaggtgtgggagcagaggaatggaaacaatcgtgagtttttgagctagggaaagttggagctcctttaatctttttaaaggatcagtgctgccctaagtgaataaactcaattgtccatctttattttagagttttaatgaattcaaggaagggagcatagcatatctgtggcaaactattttccactcaaatcctgagttattgctgcatgctttaatttcttccctttcagcatctgagaaccttaaagccaatgtctgcgatctttttttggatatttatacttttagatatatagtacctttaagtagcagtatgggacaaggcttgtaaatgttttgtctaatgttctattgtcaccttttatgcatttatcacttccaaatctaactttgcacaagtaacccatgtaaaaaaaaatgtacatttttcaaaagttgt

SEQ ID NO: 162 - DNA, 4602 bp, Homo sapiens
attagccgtcgctccgcttcgccatctcgggctttgtctggcgactcgctgccccggcgtcggctgcagcggagctgcggctcgactgttcggcccgccgtgctcccaggtgcccccggcctgcgctcccatccacacgctcgggtgaggtggctttgaccccgggttgcccggccagcacgaccgaggaggtggctggacagctggaggatgaacggagaagccgactgccccacagacctggaaatggccgcccccaaaggccaagaccgttggtcccaggaagacatgctgactttgctggaatgcatgaagaacaaccttccatccaatgacagctccaagttcaaaaccaccgaatcacacatggactgggaaaaagtagcatttaaagacttttctggagacatgtgcaagctcaaatgggtggagatttctaatgaggtgaggaagttccgtacattgacagaattgatcctcgatgctcaggaacatgttaaaaatccttacaaaggcaaaaaactcaagaaacacccagacttcccaaagaagcccctgaccccttatttccgcttcttcatggagaagcgggccaagtatgcgaaactccaccctgagatgagcaacctggacctaaccaagattctgtccaagaaatacaaggagcttccggagaagaagaagatgaaatatattcaggacttccagagagagaaacaggagttcgagcgaaacctggcccgattcagggaggatcaccccgacctaatccagaatgccaagaaatcggacatcccagagaagcccaaaaccccccagcagctgtggtacacccacgagaagaaggtgtatctcaaagtgcggccagatgagatcatgagagactatatccagaagcacccagagctgaacatcagtgaggagggtatcaccaagtccaccctcaccaaggccgaacgccagctcaaggacaagtttgacgggcgacccaccaagccacctccgaacagctactcgctgtactgcgcagagctcatggccaacatgaaggacgtgcccagcacagagcgcatggtgctgtgcagccagcagtggaagctgctgtcccagaaggagaaggacgcctatcacaagaagtgtgatcagaaaaagaaagattacgaggtggagctgctccgtttcctcgagagcctgcctgaggaggagcagcagcgggtcttgggggaagagaagatgctgaacatcaacaagaagcaggccaccagccccgcctccaagaagccagcccaggaagggggcaagggcggctccgagaagcccaagcggcccgtgtcggccatgttcatcttctcggaggagaaacggcggcagctgcaggaggagcggcctgagctctccgagagcgagctgacccgcctgctggcccgaatgtggaacgacctgtctgagaagaagaaggccaagtacaaggcccgagaggcggcgctcaaggctcagtcggagaggaagcccggcggggagcgcgaggaacggggcaagctgcccgagtcccccaaaagagctgaggagatctggcaacagagcgttatcggcgactacctggcccgcttcaagaatgaccgggtgaaggccttgaaagccatggaaatgacctggaataacatggaaaagaaggagaaactgatgtggattaagaaggcagccgaagaccaaaagcgatatgagagagagctgagtgagatgcgggcacctccagctgctacaaattcttccaagaagatgaaattccagggagaacccaagaagcctcccatgaacggttaccagaagttctcccaggagctgctgtccaatggggagctgaaccacctgccgctgaaggagcgcatggtggagatcggcagtcgctggcagcgcatctcccagagccagaaggagcactacaaaaagctggccgaggagcagcaaaagcagtacaaggtgcacctggacctctgggttaagagcctgtctccccaggaccgtgcagcatataaagagtacatctccaataaacgtaagagcatgaccaagctgcgaggcccaaaccccaaatccagccggactactctgcagtccaagtcggagtccgaggaggatgatgaagaggatgaggatgacgaggacgaggatgaagaagaggaagatgatgagaatggggactcctctgaagatggcggcgactcctctgagtccagcagcgaggacgagagcgaggatggggatgagaatgaagaggatgacgaggacgaagacgacgacgaggatgacgatgaggatgaagataatgagtccgagggcagcagctccagctcctcctcctcaggggactcctcagactctgactccaactgaggctcagccccaccccagggcagccagggagagcccaggagctcccctccccaactgaccacctttgtttctcccccatgttctgtcccttgcccccctggcctcccccactttctttctttctttaaaaaaaaaaaaaaatacggtgggggtagggggctggaggagcccaggccaggactctgcagcctcagagacatcagcccttgggggtcctcctccagggacagcaactatcagactaagccagcaccggaccagcctggcccaccccacccacttctgcacttgcggttccggcatggacaatggaccggagagtgggggtggggggtcccaaagagtttgatgaggccctccacacctgcggcccaatccaaggtggggtggaagcttggggaagacccattccttcccagaggggcctgccacctggacccctgcattggaactggaggcagggaacatggggaggaggagggtcggtgccttcaagaaaacaggcactgccctggtggccctctcccctgccccctgcaggaaggagctgcctggacccgttcatgggggagggggcagaagtgttttttatatatgtgtatatatttttttttaagctctgagctgtcaacgagacgtttcctaccgatctcggctgccgtctctgttgtcatttctgggagagggagggtttaggggtagatttggaaccttttaaaaatggtcttgatgtatgtggaagagagtatgtgtatgtgtgttcctgtacatagcatgggtgcagctgtggatgtgtgcaaaagagtgtgagtgtgtgtgtgtgtgtgtaaaggggtctgtcctagagcccacatcagtttgttgtgaatctggaaaaagggtcggtgagggccgggagatgttgaccctggtgggagcaggctgaggctgccccgttctccacatcctctgttttgcccagtctctgattccattagggggagtgtgctgaagccattctcggatgcttcccagaccaggctccctctgccagagtcacatgcatccgagctgctggtctccattgtccagcaggaaggcggaaaggcaggcaagatggtgtgaagcttaaagcttgtatttgatggaaaaggtctcccctgttcatctgagaggccaagcctggccaccccaggctcagaacctgggcttcaagaaatgtgctgggagctcctaacttacacatccctccagccttccttgaatcctcccaccaccccctatttcctttaatttctcaggtctgctccctcctcccccaaccccacagctgggcaagaagtctgcaaaagctgcatctgcagctgtctctaactcttcccagccatctcccgtattttttggtaccttgattccttgactcttaataagccaagccaccttatctctgtagttcttatttttttgttgactaaatttggggggttcttttttatggtcatgtcactgacctattaaattggggcttggtgcttttccaccttccccctctgaatgaaagccaaggaatgggggaagagcgggaactctgccgcggaggtggagcaagaacggtgaagggccctggtcccagagaggctggtgggtccctctcccaaaggaaggcagacagtctctgctttgccttggaccttggtgctgggggtggggaggcctgggggggacactccccactcccattccccttcctttgtcctaatcctggaattaagtacaggggtttataggttctatttcttcccaagagccctgcaaagaaccccagtttcctatttggatgcccctacactgttgtgtttcagtggaatgtattttcatttaaaaacaactttgaatggggcactttttctttcctgttttaaaaattgaaaaattcttacagtacaaacaggactgtcagggtgggggtgttggtgctgtaagaggtcactcttgagtgcattttggcactgggatgggatggctggggtgggaagacccccatccccacccccaacttcttttctaatatttaaggagtgttttgtaggattcaacaaccaccacaacttgaatttgtatcatgggaggtgggagggagtggcttagaggtgtctgcctatgcttaaagccaactgtggaagttttgttttcccttttttgtataataaagtgaaaaacaaaggtttg

SEQ ID NO: 163 - DNA, 1646 bp, Homo sapiens
cactgcgaagcccagctgcgcgcgccttgggattgactgtccacgctcgcccggctcgtccgacgcgccctccgccagccgacagacacagccgcacgcactgccgtgttctccctgcggctcggacacatagtatgaccattaggtgtttcgtctcccacccattttctatggaaaaccaaggggatcgggccatgatagccactggcagctttgaagaacgggacacctttagagaagcttgatcttggaggcctcaccgtgagaccttacaaagccggattccggcagagttcctctatctcgtcttgttgctgattaaaggtgcccctgtctccagtttttctccatctcctgggacgtagcaggaaatcagcatcatggttgggttcaaggccacagatgtgccccctactgccactgtgaagtttcttggggctggcacagctgcctgcatcgcagatctcatcacctttcctctggatactgctaaagtccggttacagatccaaggagaaagtcaggggccagtgcgcgctacagccagcgcccagtaccgcggtgtgatgggcaccattctgaccatggtgcgtactgagggcccccgaagcctctacaatgggctggttgccggcctgcagcgccaaatgagctttgcctctgtccgcatcggcctgtatgattctgtcaaacagttctacaccaagggctctgagcatgccagcattgggagccgcctcctagcaggcagcaccacaggtgccctggctgtggctgtggcccagcccacggatgtggtaaaggtccgattccaagctcaggcccgggctggaggtggtcggagataccaaagcaccgtcaatgcctacaagaccattgcccgagaggaagggttccggggcctctggaaagggacctctcccaatgttgctcgtaatgccattgtcaactgtgctgagctggtgacctatgacctcatcaaggatgccctcctgaaagccaacctcatgacagatgacctcccttgccacttcacttctgcctttggggcaggcttctgcaccactgtcatcgcctcccctgtagacgtggtcaagacgagatacatgaactctgccctgggccagtacagtagcgctggccactgtgcccttaccatgctccagaaggaggggccccgagccttctacaaagggttcatgccctcctttctccgcttgggttcctggaacgtggtgatgttcgtcacctatgagcagctgaaacgagccctcatggctgcctgcacttcccgagaggctcccttctgagcctctcctgctgctgacctgatcacctctggctttgtctctagccgggccatgctttccttttcttccttctttctcttccctccttcccttctctccttccctctttccccacctcttccttccgctcctttacctaccaccttccctctttctacattctcatctactcattgtctcagtgctggtggagttgacatttgacagtgtgggaggcctcgtaccagccaggatcccaagcgtcccgtcccttggaaagttcagccagaatcttcgtcctgcccccgacagcccagcctagcccacttgtcatccataaagcaagctcaaccttgg

SEQ ID NO: 164 - DNA, 1429 bp, Homo sapiens
aggcgcggctgggggtgcgaggctgcgcaggcgcggacggcgttggtttgaagaccttcagcgttgccctggcggagcagagacaggccctcggggtggaggtctttggtttcataagagcctgagagagatttttctaagatatgtgtaacacaccaacgtactgtgacctaggaaaggctgctaaggatgtcttcaacaaaggatatggctttggcatggtcaagatagacctgaaaaccaagtcttgtagtggagtgatggaattttctacttctggtcatgcttacactgatacagggaaagcatcaggcaacctagaaaccaaatataaggtctgtaactatggacttaccttcacccagaaatggaacacagacaatactctagggacagaaatctcttgggagaataagttggctgaagggttgaaactgactcttgataccatatttgtaccgaacacaggaaagaagagtgggaaattgaaggcctcctataaacgggattgttttagtgttggcagtaatgttgatatagatttttctggaccaaccatctatggctgggctgtgttggccttcgaagggtggcttgctggctatcagatgagttttgacacagccaaatccaaactgtcacagaataatttcgccctgggttacaaggctgcggacttccagctgcacacacatgtgaacgatggcactgaatttggaggttctatctaccagaaggtgaatgagaagattgaaacatccataaaccttgcttggacagctgggagtaacaacacccgttttggcattgctgctaagtacatgctggattgtagaacttctctctctgctaaagtaaataatgccagcctgattggactgggttatactcagacccttcgaccaggagtcaaattgactttatcagctttaatcgatgggaagaacttcagtgcaggaggtcacaaggttggcttgggatttgaactggaagcttaatgtggtttgaggaaagcatcagatttgtccctggaagtgaagagaaatgaacccactatgttttggccttaaaattcttctgtgaaatttcaaaagtgtgaactttttattcttccaaagaattgtaatcctccccacactgaagtctaggggttgcgaatccctcctgagggagatgcttgaaggcatgcctggaagttgtcatgtttgtgccacgtttcagttcagttctgaagtgttattaaatgtgttcctcagcgacagtgtagcgtcatgttagaggagacgatctgacccaccagtttgtacatcacgtcctgcatgtcccacaccattttttcatgaccttgtaatatactggtctctgtgctatagtggaatctttggttttgcatcatagtaaaataaaataaacccatcacatttggaac

SEQ ID NO: 165 - DNA, 14160 bp, Homo sapiens
ggcgcggtacaggagcagcactgccggcgggggcgggtgccagggacttggaggtggaggggacgcggcggtactctggcgtcttccgacttcgactccttaccttaaaagatgctggagtcatatgtaactccaattttaatgagctatgtgaatcgctacatcaagaacttaaagccgtcggatctacagctttcactatggggtggagacgtggtactcagcaagctcgagttaaagttggatgtgctggaacaggaactgaaattaccattcacttttttaagtggacatattcatgaattgaggattcatgtaccatggacaaaactgggttcagaaccagtggtaattaccatcaatactatggaatgcattttgaaacttaaggatgggatacaggatgaccatgaaagctgtggttctaattctaccaaccgtagtactgctgagagcacaaaatcatcaatcaaaccgcggagaatgcagcaggctgctcctacagatcctgacttaccaccaggttatgtgcagagtctgattagacgagttgtaaataatgtaaacattgtgataaataatctcatactaaaatatgttgaagatgatatcgtcctttccgtcaatatcacttctgcagaatgttatacagtaggtgaattatgggatcgtgcattcatggatatttctgcaactgatttggtgctgagaaaggttatcaatttttctgactgtacagtttgtcttgataaacggaatgccagtggtaaaatagaattttaccaggatcctttattatacaaatgttccttcagaactcgtcttcattttacatatgaaaacctaaattccaagatgccatctgttattaaaattcatactttagtggaaagtttgaaactttctatcacagatcaacaactgcctatgtttattcgtataatgcaacttggaattgctctttactatggagaaataggcaattttaaagaaggcgaaatagaggaccttacttgtcataataaagatatgctaggaaacattacaggttctgaagatgaaacaagaatagatatgcaatatcctgctcagcataaaggtcaagagttatattcacagcaagatgaggagcagccacagggatgggtgtcatgggcctggtcctttgtgcctgcaattgtgagttatgacgatggcgaggaagactttgttgggaacgatcctgcatcaaccatgcatcaacaaaaagcacagactttgaaggatcctattgtttctataggattttattgcacaaaggcaacggtgactttcaaactcacagaaatgcaagttgagagtagttattacagtccacagaaagtaaaatctaaagaagtattgtgttgggaacaagaaggaactacagttgaggcccttatgatgggagaacctttctttgattgccagattgggtttgttggttgcagagccatgtgccttaaaggaattatgggtgttaaagattttgaagagaatatgaatagaagtgaaactgaagcctgtttcttcatttgtggtgacaatttgagtacgaaaggtttcacataccttacaaattcattgtttgattaccgaagcccagaaaataatggtactcgcgcagaatttatcttggattcaactcatcataaggagacatacactgagatagctggaatgcaacggtttggggctttttatatggattacctgtatacaatggagaacactagtggcaaaggttccacaaatcaacaagacttttcttcagggaaaagtgaagatttgggaacagttcaggagaagtccaccaaaagccttgttataggtcctcttgattttcgtttggatagcagtgcggtgcataggattttgaaaatgattgtgtgtgccttggaacatgaatatgaaccatatagcaggctaaaatcagatattaaggatgaaaatgaaacaatactgaatcctgaagaggtggctcttctggaggaatatattcctactcgacatacaagtgttactctcctcaaatgtacctgcacaatttccatggctgaattcaacttgctggaccatttactacctgtcattatgggagaaaagaactcaagtaacttcatgaatactacaaacttccagtctcttcggcctttgccatccattcgaatattggtggataaaattaatctggaacattcagtgccaatgtatgctgaacagttggtgcatgtggtcagcagccttactcaaccttctgataacctgcttcattattgttatgtacactgctatcttaagatatttggtttccaggcaggactgacgtctttggattgcagtggatcttactgcttacctgtaccagttattccctctttcagcactgctctttatgggaaacttctgaaactccccacatgctggaccaaaagatctcagattgctataactgaaggtatatttgaacttccaaatctcacaattcaagctacaagagcacagacacttctcttgcaagcaatatatcaaagttggtctcatcttggaaatgtcagctcttccgcagtgattgaagctttgataaatgaaatcttcctaagtataggtgtgaaatctaagaatcccctgccaactcttgagggctcaatccagaatgttgaattgaagtactgcagcacatcattggtcaaatgtgcctctgggaccatgggatcaataaaaatttgtgccaaagccccagttgatagtggaaaagagaagttgattcccttgcttcagggtccttctgacactaaagaccttcatagcaccaagtggctcaatgagagtagaaagccagagtctctcttagctccagatttgatggccttcacaatccaagttccacaatatattgactactgccacaattccggtgctgtacttctttgcagtatacaaggactagcagttaatattgacccaatcttatatacgtggctcatctatcagcctcagaaacgaacaagtagacatatgcaacagcagcctgtggtagctgttcctcttgttatgccagtttgtagaaggaaagaggatgaggtgtctattggaagtgcccccttggcaaagcagcaatcatatcaggcctctgaatatgccagcagccctgtaaaaacaaaaacggtaacagaatcccgcccattgtcagttcctgttaaagccatgttgaatatatctgaaagctgtagaagtcctgaagaaagaatgaaggaatttattggaattgtttggaatgcagtgaagcatctcacactacagcttgaagtacaatcttgttgtgtgtttattccaaatgatagcctgccttccccaagtacaattgtatctggtgacattcctggaacagtaagaagttggtaccatggacaaaccagcatgccgggaacacttgtcctctgtttgcctcaaataaagattattagtgctgggcacaagtatatggaacctctgcaggagattccatttgttatcccacgacccatccttgaagaaggtgatgcttttccttggacgatcagcttgcataatttcagcatatatacccttcttggaaaacaagtgacactttgcctagtggaacctatgggttgcacctccactctagctgtcacgtctcaaaaactgcttgctacgggacctgatacacgacattcatttgttgtctgtctccatgttgacctagagtcactagagataaaatgctctaatccccaggtccagctcttctatgaactaactgatatcatgaataaggtctggaacaagattcagaagagaggcaatctcaacctatctccaacctctccagagaccatggcagggcctgttcctacttctccagttagaagcagtataggcacagctcctccagataccagcacatgcagcccatctgctgacattgggactactactgagggagattctatacaagcaggtgaggaatcaccattctcagattctgtgaccttggaacaaactacaagtaatattggaggaaccagtggacgtgttagtttatggatgcagtgggtgcttcccaaaattactataaagctctttgctccagatcctgaaaataaaggcacagaggtttgtatggtcagtgaactagaagatctcagtgcttccatagatgtccaggatgtatataccaaagtgaaatgtaaaatagagagtttcaatattgatcactatagaagcaggccaggggaaggttggcagtcaggacattttgaaggagtatttctacaatgcaaagaaaaatctgtgccttggggaagagtgttggtctttggggcaatgtggaggtgtcttcctttcctgtactgacaagctgaacagacgcaccttgttggttcgacccatcagcaagcaggaccctttcagtaattgctctggcttctttccttctacaactacaaaacttctagatggcactcatcagcagcatggattcctctctctgacatacacaaaagctgtaacaaaaaatgtccgccacaagttaacatcaagaaatgagcgaagaagttttcataagttatctgaaggcctaatggatggttctcctcattttcttcatgaaattcttctttcagcacaagcttttgatattgttctttattttcctttacttaatgccattgcaagtatatttcaagcaaaactaccaaagacccaaaaagagaaaagaaaatctcctggtcagcccatgaggacccatacactgacatcccgcaatttacctttgatttatgtcaacacaagtgtaatcagaatttttattccaaaaacagaagaaatgcagccaactgttgaagctaatcaggcagcaaaagaagacactgtggttttgaagattggctctgttgccatggctccccaggctgacaatccccttggcagatctgtccttaggaaagatatttaccagagagccttgaacttaggaattcttcgagatcctggatcagaaatcgaagacagacaataccaaatagatctgcagtccatcaatattggtactgcacagtggcatcaactaaaaccagagaaggaaagtgtctcaggaggggtggtaacagagactgaaaggaattctcaaaatccagcccttgagtggaatatggccagcagcatacggcggcatcaagaaaggagagcaattttgacccccgttttgacagatttttctgtccgaataactggagcacctgctgtcattttcaccaaagtagtttctccagaaaatttgcatactgaggagattttagtgtgtggccattccttagaagtgaatataaccacaaacctggacttcttcctaagtgtggctcaagttcaactcttacatcagttaatagtagcaaatatgactggactggaaccatcaaacaaggctgcagagatctctaaacaagaacagaaaaaagtggatatatttgatggaggcatggctgaaacctcatctcgctacagtggtgctcaggatagtggaattggcagtgacagtgttaaaatcagaatagtgcaaatagagcagcacagtggtgccagtcagcatcgcattgcccgtccctcacgccagtcatcaattgtaaaaaatctaaattttattccctttgacatatttattactgcaagtagaatctcactaatgacctattcctgtatggccttatccaaatcgaaatcacaagaacagaagaataatgaaaaaacagacaagagttcattaaatctcccagaagttgattcagatgttgctaagcccaaccaggcatgtatttccacggtgacagcagaagatctcttaaggagcagcatttcttttccttcagggaaaaaaataggggtcctctctcttgaaagtcttcatgcatccacaaggtcatctgctagacaagcacttggtataactattgttcggcagcctggtcgaagaggaactggtgacttacagctagagccttttctgtactttattgtgtcccagccttccttgcttctgagttgtcaccacagaaagcagcgagtggaagtatccatttttgatgctgtgcttaaaggggtggcctctgattacaaatgtatagatcctgggaagactctgcctgaagcccttgattattgcactgtttggctacagacagtgcctggagaaatagacagcaaaagtggtattccaccttcctttataacactacagattaaagactttctgaatggaccagcggatgtcaatttggatatatcaaagcctttgaaagcaaacctgagtttcaccaaactggatcagataaacctttttttaaagaagataaaaaatgcacacagtttggcacatagtgaagagacttcagccatgtccaacaccatggtgaataaggatgatcttccagtctccaaatattaccgtggaaagttgtctaaacccaaaattcatggtgatggagtgcaaaagatttcagctcaagaaaacatgtggagagctgtttcctgctttcaaaaaatttctgttcaaactactcagattgtgatctccatggaaactgtaccccataccagcaaaccatgcctgttagcatctctctcaaacctcaatggaagccttagtgtcaaggcaacacaaaaagtacctggcataattcttgggtcatcatttctactcagtataaacgattttctccttaaaacaagtctcaaagaaagaagccgcattctgataggaccatgttgtgctactgccaatctggaagctaagtggtgtaaacacagcgggaatccaggcccagaacaatccataccaaaaatatccattgacttaagaggaggtctactacaggtcttctggggtcaagaacatttgaattgtttagttcttctacatgaattactcaatggataccttaatgaggagggaaattttgaagtacaagtttctgaaccagtgcctcaaatgtcatctcctgtggaaaagaatcagacatttaaaagtgaacaaagttcagatgacctacggacaggtctatttcagtatgtacaggatgctgaatctttgaaattgcctggggtctatgaagtcttattttataatgaaactgaagattgcccagggatgatgttatggagatatccagaacctagagtactcacccttgtacgaataactcctgtaccttttaacaccacagaggatccagatattagcacagcagaccttggtgatgtgctacaggttccttgtagcttggaatactgggatgaactccagaaggtttttgttgcatttagagaatttaatctgtctgaaagcaaagtttgtgaactgcagttgccggatatcaatctcgtgaatgaccagaagaaattagtatcttcagatctttggagaattgtcttgaacagcagtcaaaatggagctgatgaccaaagctctgcaagtgagtctggttctcaaagcacttgtgatccacttgtgactccaacagccctggctgcctgtaccagagttgactcctgctttaccccatggtttgtcccatccctttgcgtttctttccagtttgctcacctggaattccatctttgtcatcaccttgaccaactaggcacagctgcaccacagtacctacagccatttgtttccgacagaaatatgccatctgaactagaatacatgattgtttccttcagagaaccacacatgtatcttcgacagtggaataatggttctgtctgtcaggagatccagttcttagctcaagcagactgtaaacttctagagtgcagaaatgtcactatgcaaagtgtggtgaaacccttcagcatcttcgggcagatggcagtttccagcgatgtagtggaaaagctgcttgactgcaccgtgatagttgattctgtatttgtaaaccttggacagcatgtagtccattcactaaacactgcaatacaagcttggcaacagaacaaatgccctgaggtagaggagttggtcttcagccattttgtgatctgtaatgacacacaggagacactgcggtttggccaggtggatactgatgaaaatattctgctggcgagtctccacagtcaccagtacagctggcgctctcacaaatccccacagctgttacacatctgtattgaaggttggggcaactggcgttggtcagagcctttcagtgtggaccatgccgggacttttattagaacaattcagtacaggggtcgaactgcttctctcatcatcaaggttcagcaactcaatggagtacaaaaacagattatcatctgtggaagacagatcatctgtagttacttgtctcaaagcatagaactaaaagtcgttcagcattacattggtcaagatggacaagctgtagttcgggaacattttgactgcctcacagccaaacagaaattgccttcgtacatactagaaaacaatgaactgacggagctgtgtgtgaaggccaaaggagatgaagactggtcaagagatgtgtgcctggaatccaaagcccctgagtacagcattgtcattcaggtgccatcttcaaacagttccattatttatgtctggtgcacagttttgactttagaacccaactctcaagtgcaacaacgaatgattgtgttcagccctctttttatcatgaggagtcatcttccagaccccattatcatacatttggagaaaaggagtctgggattgagtgaaacacaaattattccaggaaaagggcaggaaaaaccactgcaaaacatagaacctgaccttgtacatcacctgacattccaagcaagagaagaatatgatccttcagattgtgcagttcccatctcaacatccctcattaagcaaatagccactaaggtacaccctggaggcacagttaatcagatccttgacgaattctatgggccagaaaagtcgcttcaacccatatggccctataataagaaggattctgacaggaatgaacagctaagtcagtgggatagcccaatgcgagtgaagctgtcaatctggaagccatatgttagaactttgttgatagaacttctgccctgggccctgcttatcaatgaatccaaatgggacctctggctatttgaaggagagaaaattgttctacaggttcctgctggcaaaattattattcctcctaattttcaggaagcttttcaaattggaatatactgggcaaatacaaacactgtgcacaagtcagtagcaattaaactggtccataacctgacatctccaaagtggaaagatggaggtaatggtgaagttgtgacactggatgaagaagcgtttgttgatactgaaataagacttggtgcttttccaggacatcagaagttatgtcagttctgcatttcctccatggtacagcaaggtatacaaattattcagattgaagacaagactacaataatcaataatacaccatatcaaatattttataaaccacagctatctgtctgcaatccccattctggaaaggagtattttcgtgttccagacagtgctacttttagcatttgcccaggtggagagcagcctgctatgaaatccagctcccttccttgctgggacttgatgcctgacatcagtcagtcagtactggatgcatccctgcttcagaaacagatcatgctgggcttttctcctgccccaggtgctgacagctcacagtgctggagcctgccagctatagttagaccagagtttcccagacagagtgtggcagtacccctcgggaatttccgggaaaatggattctgtaccagggctatagtgctgacatatcaagaacacctcggagtgacttatttaaccctctcagaagaccctagtcctcgagtaattatccacaatagatgtccagtaaaaatgcttataaaggaaaacattaaagatattccaaagtttgaggtttattgcaaaaaaattccctccgagtgctcaattcatcatgagctgtatcatcagatttccagttatccggactgcaagaccaaagacttacttccaagcctacttttgagagttgaacctctagatgaagtaacaactgagtggagtgatgccattgacatcaacagtcagggaacacaggttgtgttcctgactggctttggctatgtgtatgtggatgttgtacatcagtgtggcacagtcttcatcactgtggccccagaaggaaaagcaggacctattttaaccaataccaacagagcgccagagaagattgttacatttaaaatgttcatcactcagttaagcctggcagtgtttgatgacctcacccaccacaaagcatcagctgagcttctgagactcacactggacaacatttttctctgtgtggccccgggagctggtcccctccctggggaagagcctgtggctgcgttgtttgaactttactgtgtggagatctgctgtggggacctgcagctagacaaccagctttataacaagtccaatttccactttgctgtcttagtctgccagggagaaaaagcagaacccattcagtgttccaaaatgcagagtctcctcatatccaacaaagagttggaagaatacaaggaaaaatgttttatcaaactttgcatcaccttaaatgaaggcaagagcatcctctgtgatattaatgagttcagctttgaattaaaacctgctcggttatacgtggaagacacatttgtatactacatcaagactttgtttgacacctaccttcctaacagcaggttggctggtcactccacacacctctccgggggtaaacaggtgttgcccatgcaggtcacacagcacgccagggccttggtgaatcctgtgaagttacggaaactggtgatccagccagtaaatttgctcgtcagcatccacgcttccctcaagctgtacatagcctcagaccacactcctctctccttctcggtgtttgaaagaggacccatcttcaccactgcgaggcagcttgtgcacgccctggcaatgcactatgccgctggggccctttttagagcaggctgggtagttgggtctctggatattcttggcagccctgcaagcctggtgagaagcatcgggaacggggtcgccgacttcttcaggcttccgtatgaggggctgacccggggccctggagccttcgtgagtggcgtctccagagggaccacatcgtttgtaaagcacatctccaaaggtaccctcacatccatcaccaacctcgccacaagcctggcccggaacatggaccggctctcactggatgaggagcactacaaccggcaggaggagtggcggcggcagctccccgagagcctgggcgaggggcttcgacagggcctgtcccggctgggcatcagcctgcttggtgcaattgctggtatagttgatcagccgatgcagaacttccagaaaacatctgaggcacaggcttcagcaggacacaaggccaagggtgtcatctcgggtgtggggaaaggaatcatgggggtgttcacaaagcccatcggaggagctgctgagctggtgtcacagactggctatggtattttacatggagctggactttctcagcttcccaaacagcgccatcagccaagtgatctacatgctgaccaggctccaaacagccatgtcaaatatgtctggaaaatgcttcagtctctgggcagaccagaagtccacatggccctggacgtggttctggtgaggggctcaggccaggagcatgaagggtgcttgctgctgacatcagaagtgctcttcgtggtgagtgtcagtgaggacacacagcagcaggccttccccgtcacagaaatcgactgtgcacaggacagcaagcagaacaacttactcacagtgcagctcaagcagccaagagtggcctgtgatgtggaggtagatggagtccgagagagactgtcagagcaacagtacaacagactggtggactacatcacaaagacatcttgtcacctggcccccagctgttcttccatgcaaataccatgccctgtggtggctgcagaacctcccccctccactgttaaaacataccattacctggttgatccacattttgctcaggtcttccttagtaaatttaccatggtgaaaaataaagccctgaggaaagggtttccttgagtcccctctgaggtgtttattcctgcttgtgtgatttagtttttgggtttctttgagacagggtctcactgcattgcccttgctgacctcaaattctggggttcaagcaatcctcccacctcaacccacaagtagctacgactgcaagcacctgccaccataaagggctgcattttgccaccataaagggctgcatttttttaaaaagcctaggcagctctaacatcatctgatatggacacaaggccaacagtttccttatttacatccttacctctaaaagatacttcaaagtgacaaaaacgtgttccttccccacttagagacaatgattaacagggccctatatgttcttaccacatacagaggatgcatttatttttgctctatgacacttgcaaaaatctctactgtaattaatttgggtctattattaactctctgttccatcatagaatgtggccaggccttacaatggagagccagagttaaaacttcaagttgcatctgtttttgggctgagtcaccacctttgcctcatgctcctttgtctgcaaaggcctaggattctttctttaaatgaaatgcttaggactttgtggcttgttacatttgtcatttaactgcagtgctattctttgaaagctgctatgtgtattttctctgaagtctgcattttactaaaatttacaacagtctgatgattgattgattactgtccaggtacattttagaaaaagtgttcttcttccagtttgttttactaagcaaactttgagtaaatcctttgtcctatattgaatccagtcccaaagtgttcaggtgagtttctctagttccataaacaaaacatacatagtgggaactccctggtatgccatagagcacacaagaaccccaatattaatgctaacaattataccagtccattttgtttattctgtggaattgacttgacaaagcatgaagatattcccagtgtctgtctgataatattttgcatctaagaatgggtttgactcaagatcttgggttaccaagatgtcttaaatgttcagtaaatatctttcttacagtccagtagcttagagcatgtttgctgattgatattacatttaaacttggggctacagcttgttacctagaattttgagatactaagagaatgcaattttaaatgcccactggttttatttgttttggagagagggtctcattctgtcacccaggctagagtacagtgggaacagtcatggctcactgcagcttaagctcactgcctgggctcaagtgatcttactccagcctcccaagcagctgggactacaccaccacaggtatgcaccaccatacctggctgatttttaaaattttttctagagatgaggtctcactatgttgcccagctggtctcatactcctcagttcacgcattcctcccacctccacctcccaaactgctgggattacaggtgtgagccaccatgcccaacacccactgatctttaactctcacatgttgggcataagaagtcactatataattgttactggaaagcaagacttaacgaacaattctgactatgaaaaatgtctctttcagtttgttctgtaaatatttagaaaagtgacagctgtcaacctcagagtaactatttctaaaaatgtaaatatgtattaatccttgtatcttttatggtaattttgcatattgatatgaattatataaaattgtttaaaataaaaggtgtccttgaattactgaccacccatagatgtctactgttaccaggttttacaatgcaaattttcactaatacctgggtttaatacagctcacatcactgaatgttacacatgagtttaaatgggtaatatacaggttttgttataataaagttactgattaaatt

SEQ ID NO: 166 - DNA, 5431 bp, Homo sapiens
gggggctttgtgcgcggcggcggcgggagaggcggcggcggcggccagcacggaggcggaggccgagggggctgtgcacaggtcgccgcggagaggcgtgcgaattccgagccgagcgccgaggaccgtgctacccaggccgggctgccagccgcaggctcctctctggcagcagcggcggcgcggcgacccccgtccctcggcctccccttcccatcccacctcccgagccttcctcttcccgcagcacgcccggcccggcccggccgtggccctcctcagtgccggccgccatggcagaggcgtccggcgcggggaaaatctagcccggggatttcatgcggcctagctcggttccgcctcctcctcgcgcggccccagcggctgcccgcaccccagccccactccgggcctccgtgtctctcctgtgatcgcactgacacggccggggggttagaatggaacaaactgaaggcccgatgagagaaagggaaagttaaggatgctggagcagaacaatggatttctctttctctttcatgcaagggatcatgggaaacacaattcagcaaccacctcaactcattgactccgccaacatccgtcaggaggatgcctttgataacaacagtgacattgctgaagatggtggccagacaccatatgaagctactttgcagcaaggctttcagtacccagctacaacagaagatcttcctccactcacaaatgggtatccatcatcaatcagtgtgtatgaaactcaaaccaaataccagtcatataatcagtatcctaatgggtcagccaatggctttggtgcagttagaaactttagccccactgactattatcattcagaaattccaaacacaagaccacatgaaattctggaaaaaccttcccctccacagccaccacctcctccttcggtaccacaaactgtgattccaaagaagactggctcacctgaaattaaactaaaaataaccaaaactatccagaatggcagggaattgtttgagtcttccctttgtggagaccttttaaatgaagtacaggcaagtgagcacacgaaatcaaagcatgaaagcagaaaagaaaagaggaaaaaaagcaacaagcatgactcatcaagatctgaagagcgcaagtcacacaaaatccccaaattagaaccagaggaacaaaatagaccaaatgagagggttgacactgtatcagaaaaaccaagggaagaaccagtactaaaagaggaagccccagttcagccaatactatcttctgttccaacaacggaagtgtccactggtgttaagtttcaggttggcgatcttgtgtggtccaaggtgggaacctatccttggtggccttgtatggtttcaagtgatccccagcttgaggttcatactaaaattaacacaagaggtgcccgagaatatcatgtccagttttttagcaaccagccagagagggcgtgggttcatgaaaaacgggtacgagagtataaaggtcataaacagtatgaagaattactggctgaggcaaccaaacaagccagcaatcactctgagaaacaaaagattcggaaaccccgacctcagagagaacgtgctcagtgggatattggcattgcccatgcagagaaagcattgaaaatgactcgagaagaaagaatagaacagtatacttttatttacattgataaacagcctgaagaggctttatcccaagcaaaaaagagtgttgcctccaaaaccgaagttaaaaaaacccgacgaccaagatctgtgctgaatactcagccagaacagaccaatgcaggggaggtggcctcctcactctcaagtactgaaattcggagacatagccagaggcggcacacaagtgcggaagaggaagagccaccgcctgttaaaatagcctggaaaactgcggcagcaaggaaatccttaccagcttccattacgatgcacaaagggagcctggatttgcagaagtgtaacatgtctccagttgtgaaaattgaacaagtgtttgctcttcagaatgctacaggggatgggaaatttatcgatcaatttgtttattcaacaaagggaattggtaacaaaacagaaataagtgtcagggggcaagacaggcttataatttctacaccaaaccagagaaatgaaaagccaacgcagagtgtatcatctcctgaagcaacatctggttctacaggctcagtagaaaagaagcaacagagaagatcaattagaactcgttctgaatcagagaaatccactgaggttgtgccaaagaagaagatcaaaaaggagcaggttgaaacagttcctcaggctacagtgaagactggattacagaaaggtgccagcgagatttcagattcctgtaaacctctaaagaaaaggagtcgcgcctcaactgatgtagaaatgactagttcagcatacagagacacatctgactccgattctagaggactgagtgacctgcaggtaggctttggaaagcaagtagatagcccttcagctactgcagatgcagacgtttctgatgtgcagtccatggattcaagtttgtcgagaagaggcactggaatgagtaagaaggacactgtatgtcagatttgtgaaagctctggtgactctctgattccttgtgagggagagtgctgcaaacactttcacctggagtgcctgggattggcatcacttcctgatagcaagttcatctgcatggaatgtaaaactgggcagcacccatgtttttcgtgtaaagtgtctggtaaagatgtgaagcgttgttctgttggtgcttgtgggaaattttatcatgaagcctgtgtccgcaaattccccactgccatctttgaatcaaaaggattccgctgtcctcagcactgctgctctgcctgctctatggagaaagatatccacaaagcaagtaaaggccgcatgatgagatgtttaagatgtccagttgcctatcactctggagatgcttgcattgcggccggaagcatgttagtatcctcctacattctcatctgtagtaatcattccaaacggagcagtaattcttctgctgtaaatgtaggcttttgtttcgtttgtgccagagggctgatagttcaggaccattcagaccccatgttcagttcatatgcctataagtcccactacctactgaatgaatcaaatcgtgctgagttgatgaaattacctatgattccttcttcgtcagcttccaaaaagaaatgtgagaaaggtggaagattgctctgctgtgaatcgtgcccagcttccttccacccggaatgcctaagcatagaaatgccagaaggctgctggaattgtaatgactgtaaagctggcaagaaactacattacaagcagattgtttgggtcaaattgggaaattacagatggtggccagcagagatctgcaaccccaggtctgtgccactgaacatccagggccttaaacatgacttgggggacttccctgtattcttctttggttctcatgactactactgggtacaccagggcagagtgttcccttatgttgaaggagacaaaagctttgctgaagggcagactagtattaacaagaccttcaaaaaggcactggaagaagctgcaaaacgtttccaggaattgaaagcacaaagagaaagtaaagaagccctagagattgaaaaaaactcaagaaaaccccctccctacaaacacatcaaagctaacaaagtaataggaaaggtgcagatccaggttgctgacctgtcagagattccccgctgtaactgcaagccagctgatgaaaacccttgtggcttggaatcggagtgcctgaacagaatgttgcagtatgaatgccacccgcaggtgtgcccagctggagatcgttgtcagaaccagtgctttacaaagagactataccctgatgcagagatcatcaaaacggagcggagaggctggggcctcaggaccaaaaggagcattaagaagggtgaatttgtaaatgaatacgtcggtgaattaattgatgaagaagaatgcagattgcgaatcaagcgagcccacgagaacagtgtaactaatttttatatgttaactgttaccaaggaccgtataattgatgccggcccaaaaggaaattattctcgcttcatgaaccacagttgtaatcccaactgtgaaacacaaaagtggacagtgaatggagatgttcgagtgggactatttgctctctgtgatattcctgcagggatggagttaacatttaattataacctagattgtctgggcaacggcagaacggagtgccactgtggagcagataactgcagtggttttctaggagtgcggccaaagtcggcatgtgcgtcaacaaatgaagagaaggcaaaaaatgctaagttaaaacagaagagacgaaagatcaaaacagaaccaaagcagatgcatgaagattactgttttcaatgtggagatggtggagagctggtcatgtgtgacaaaaaagactgtcccaaagcataccacctcctatgccttaacctgactcagccaccatatggaaagtgggagtgtccgtggcatcagtgcgatgagtgcagcagtgcagctgtttccttctgtgaattctgtccacattcattttgtaaagatcatgaaaagggggccctggttccctctgcactggaaggccgcctctgctgctcggaacatgaccccatggctcctgtgtcaccagaatactggagcaagataaaatgtaaatgggaatcacaagatcatggagaagaagtaaaagaataaatgtgtggtgtcccctcctttctatttaagtgaaaaaagcaaatagatcatgcatttaaaaagaagagactgctacagtgcatacagcctttgccatcggaactgccttattaaagcaaaaatgggaaaccagttcatgcaggcagaagcagttggtggtgtctggtttttgtttgatttggttggtttgggattcttttgtggagggttaaattcccttggtcttttcttgccttttattgtgcttcagtgccattgcagcttgaaaaagaaatgtttttgctgttaaaataagaacaaagagaaaagtaagttttgttaatgagataaatttaaagtctaagatgtgttccttggttgtataaagcaaaagtagccatcattcctttatttattttcatttttaggaatttcaagaagtgtagttcaatagtctaatcaagtgtgtgtgtgttttaagtaggaatctgagaaagccctctaggaaagggtatgataagctttatatacctctttactgagcagtaggtaggctcacttctctttcccttcaaaatgcttttcataggcttagagaagggctctatggaagtattaaa

SEQ ID NO: 167 - DNA, 1120 bp, Homo sapiens
gagccaatggcaggcgcgggggatgacgccacggacatggtggccgagaccggcggggtgggggacgtgtcgcgcggccgggtggcctcggtcggtaccctgggcgcggagcagctgcctcattagtattcgtacccacgaggcggcgcagcgggccctcggggacagcgagcgtcgcggccatggcttatcactcgggctacggagcccacggctccaagcacagggcccgggcagccccggatccccctcccctcttcgatgacacaagcggtggttattccagccagcccgggggatacccagccacaggagcagacgtggccttcagtgtcaaccacttgcttggggacccaatggccaatgtggctatggcctatggcagctccatcgcatcccatgggaaggacatggtgcacaaggagctgcaccgttttgtgtctgtgagcaaactcaagtatttttttgctgtggacacagcctacgtggccaagaagctagggctgctggtcttcccctacacacaccagaactgggaagtgcagtacagtcgtgatgctcctctgcccccccggcaagacctcaacgcccctgacctctatatccccacgatggccttcattacttacgtgctcctggctgggatggcactgggcattcagaaaaggttctccccggaggtgctgggcctgtgtgcaagcacagcgctggtgtgggtggtgatggaggtgctggccctgctcctgggcctctacctggccaccgtgcgcagtgacctgagcacctttcacctgctggcctacagtggctacaaatacgtgggaatgatcctcagtgtgctcacggggctgctgttcggcagcgatggctactacgtggcgctggcctggacctcatcggcgctcatgtacttcattgtgcgctctttgcggacagcagccctgggccccgacagcatggggggccccgtcccccggcagcgtctccagctctacctgactctgggagctgcagccttccagcccctcatcatatactggctgactttccacctggtccggtgaccccctggccccagatggcactgagtttttcattcattgaagatttgatttccttg

SEQ ID NO: 168 - DNA, 2322 bp, Homo sapiens
cggagcggggaacgaggccgtcggccattttgtgtctgcttcctgtgggacgtggtggtagccgttgggttgggaaagtgagggatttttggcctcgtttctcctgcttcttttctcctcccttttactttgccggtagaacacagttatgggtcgcaagaagaagaagcagctgaagccgtggtgctggtattgtaatagagattttgatgatgagaagatccttattcagcaccaaaaagcaaagcattttaaatgccatatatgtcacaagaaattgtatacaggacctggcttagctattcattgcatgcaggtacataaagaaacaatagatgccgtaccaaatgcaatacctggaagaacagacatagagttggaaatatatggtatggaaggtattccagaaaaagacatggatgaaagacgacgacttcttgaacagaaaacacaagaaagtcaaaaaaagaagcaacaagatgattctgatgaatatgatgatgacgactctgcagcctcaacttcatttcagccacagcctgttcaacctcagcaaggttatattcctccaatggcacagccaggactgccaccagtaccaggagcaccaggaatgcctccaggcatacctccattaatgccaggtgttcctcctctgatgccaggaatgccaccagttatgccaggcatgccacctggattgcatcatcagagaaaatacacccagtcattttgcggtgaaaacataatgatgccaatgggtggaatgatgccacctggaccaggaataccacctctgatgcctggaatgccaccaggtatgcccccacctgttccacgtcctggaattcctccaatgactcaagcacaggctgtttcagcgccaggtattcttaatagaccacctgcaccaacagcaactgtacctgccccacagcctccagttactaagcctcttttccccagtgctggacagatggggacacctgtcacaagctcaagtacagcttcatccaattcagaaagtctgtctgcatcttctaaagctctgtttcctagcacagcacaagctcaggcagctgtccaaggacctgttggtacagatttcaaacccttaaatagtacccctgcaacaactacagaacccccaaagcctacattccctgcttatacacagtctacagcttcaacaactagtacaacaaatagtactgcagctaaaccagcggcttcaataacaagtaagcctgctacacttacaacaactagtgcaaccagtaagttgatccatccagatgaggatatatccctggaagagagaagggcacagttacctaagtatcaacgtaatcttcctcggccaggacaggcccccatcggtaatccaccagttggaccaattggaggtatgatgccaccacagccaggcatcccacagcaacaaggaatgagacccccaatgccacctcatggtcagtatggtggtcatcatcaaggcatgccaggataccttcctggtgctatgcccccgtatgggcagggaccgccaatggtgcccccttaccagggtgggcctcctcgacctccgatgggaatgagacctcctgtaatgtcgcaaggtggccgttactgatcttacttcatccagtctaataggtttggagattaaaccttttctcaacttgtgctgtttatatagccaagcttccgtcaataaggcttcattgtgactttaacaaacattatcttcccacataccaggaactattggacatttattttacatgggaaaaattatttggaataataaagcaggaacttttcctgaagttgcaatttatactgtatggcttctttttcatgtttcatctaggtttttagaagtgaagtatagtaaatttggttcgttaaattgtgaaggcgctggaattacatgaacataccaccctagtaaaggcaagttctgtaagcttacattgctatttgtaaagtttgccttcacagcatttcagatgctgttggacttcatgtccccaacctagcttggtgagggctgtaactgtttccaagtacttgtacattggaagtctgaatgtgtaacaatatttaatgtatttagagttcctcatgttgcagggtttaagaaatctgacccaccaaggtcatgtgacttttctgtactgttaaacttcattgtaataaaatgagagaaaaatttatgcctttttattcataacccagctgtggaccactgcctgaaaggtttgtacagatgcatgccacagtagatgtccacataataaaattcatagttaccaatgc

SEQ ID NO: 169 - DNA, 4800 bp, Homo sapiens
aagtgcgcatgtgcgcgaggagtcgctcgggcacttattgagcgccgactgtctacgggcggccgggggtgatgggcagaggcttcagtgtccccttcgcctccgcaggagaggagaggcagcagcatggcgagtgtcctgtcccgacgccttggaaagcggtccctcctgggagcccgggtgttgggacccagtgcctcggaggggccctcggctgccccaccctcggagccactgctagaaggggccgctccccagcctttcaccacctctgatgacaccccctgccaggagcagcccaaggaagtccttaaggctcccagcacctcgggccttcagcaggtggcctttcagcctgggcagaaggtttatgtgtggtacgggggtcaagagtgcacaggactggtggagcagcacagctggatggagggtcaggtgaccgtctggctgctggagcagaagctgcaggtctgctgcagggtggaggaggtgtggctggcagagctgcagggcccctgtccccaggcaccacccctggagcccggagcccaggccctggcctacaggcccgtctccaggaacatcgatgtcccaaagaggaagtcggacgcagtggaaatggatgagatgatggcggccatggtgctgacgtccctgtcctgcagccctgttgtacagagtcctcccgggaccgaggccaacttctctgcttcccgtgcggcctgcgacccatggaaggagagtggtgacatctcggacagcggcagcagcactaccagcggtcactggagtgggagcagtggtgtctccaccccctcgcccccccacccccaggccagccccaagtatttgggggatgcttttggttctccccaaactgatcatggctttgagaccgatcctgaccctttcctgctggacgaaccagctccacgaaaaagaaagaactctgtgaaggtgatgtacaagtgcctgtggccaaactgtggcaaagttctgcgctccattgtgggcatcaaacgacacgtcaaagccctccatctgggggacacagtggactctgatcagttcaagcgggaggaggatttctactacacagaggtgcagctgaaggaggaatctgctgctgctgctgctgctgctgccgcaggcaccccagtccctgggactcccacctccgagccagctcccacccccagcatgactggcctgcctctgtctgctcttccaccacctctgcacaaagcccagtcctccggcccagaacatcctggcccggagtcctccctgccctcaggggctctcagcaagtcagctcctgggtccttctggcacattcaggcagatcatgcataccaggctctgccatccttccagatcccagtctcaccacacatctacaccagtgtcagctgggctgctgccccctccgccgcctgctctctctctccggtccggagccggtcgctaagcttcagcgagccccagcagccagcacctgcgatgaaatctcatctgatcgtcacttctccaccccgggcccagagtggtgccaggaaagcccgaggggaggctaagaagtgccgcaaggtgtatggcatcgagcaccgggaccagtggtgcacggcctgccggtggaagaaggcctgccagcgctttctggactgagctgtgctgcaggttctactctgttcctggccctgccggcagccactgacaagaggccagtgtgtcaccagccctcagcagaaaccgaaagagaaagaacggaaacacggagtttgggctctgttggctaaggtgtaacacttaaagcaattttctcccattgtgcgaacattttattttttaaaaaaaagaaacaaaaatatttttccccctaaaataggagagagccaaaactgaccaaggctattcagcagtgaaccagtgaccaaagaattaattaccctccgtttcccacatccccactctctaggggattagcttgtgcgtgtcaaaagaaggaacagctcgttctgcttcctgctgagtcggtgaattctttgctttctaaactcttccagaaaggactgtgagcaagatgaatttacttttcttaaaaaaaaaaaaaaaaaaaaaaaaaaagagtttctggctgatgggtgactcagagtgcaggactgcctggccgtggggcagaggggtttgcccttctcggagggtacctcctgttccctgtctgagcatcctgcatggaagtcaaaggaaatccctttcttggtgacgacttaaatctgggttccctcagacattgggttgcaccccaacaaatattaaatggcttcttcttaaagcccagagaaagaggttttttaaaagactgtcgccaaatagctgagccaaaaggctgatcagaattcactttttggaatgtggcagttaaacactaccttgatcattctctcctctttcctcgaggaactcctggagggtttgagcgtctggaaactctctgctctgacccgaggaagcaccctcctgacgccgccttcctccggttattgaaaggacgcctcagaaatgctttgttttcttttacgatgtattcagaagcctttactgattaaagttttcttttatttgggtggccgggagagacccagggaggttctggaggttcctttctgtctcctggccccaccagggatttccccatttctgtttgctgcctgaaagcaggatgaggaaggccaaggagagtccttgcacccgtgagcgtcaggatgaggaaatgacaggaggaagacgtgggtttgggttagtggctgctggcgttttggcccttggtgtttctggagcctccagggatctaggggagcctgggctgcgtgcatgtcgataagcagagctgttcttggggagaaggagggaggtctcgggagtgtagcaccatgccaaccagccctgcgcgaagacagagtgagccacgcccggatggcagggcatgtttctgttttggtgtctcactttcctcccagcgtgacttatttggggattcctcagggcctactggaatgtgactgcccactgcccagctgcctcgggtacaagtcctggccctatgtcccagctgtcaggggctcagggaatcctacccagccacctgtcctgggatggagtgtcagcatccaccccttggttgtcatcgaggccgccctcccagtcctgggtgaagatatttgggccaccagggctcccttggccccttcacgtaggaaatagacacgtgctttttaatgcaggacactttgagtgttacaaaatctgtagacctggcagtagggtcatgatgttgggaagggtgtagtgccctaggttggtgacagaagggacagacacttgtgcacaggtgtctttggtgatggggtttttttttttataacttagtaaaaaaaaaaaaatgtatgtggaattctgtctcttggtaaagctcaaagccaggctagcctgaggtggcgcagggctctccttcctgtcccttcgatctccttgagaattaagagctggcagctgctgatggtgtttcccaacccccctcacttcccaagacaacccccagcttcaggtcctcatggggaggggagggcacgttcttgacacatgggaacttcgctcaggagggcctccccttcccctctccctcagagttttcactgccgtctcgtctttagaaagctgtttgaattccccccgcccccagtttggaccgtgtagatataactggatatacggatttttctctttgtgcaggcttcttatgccgttggtatacagggcaggaaagagaggaataaagggagagagcagtgtggaaaccacggtggttttgctttgttcttactaggttttggtgccaccttccctgcctgcgcttgtgccccctctcctccttggcactggcggcctccttgcctcccttccacccgtgctgccatcccgtgcctgtcgtgttggttcttcacacgtgctctgttctcggggttgttccattcatgccttcttggagggtgagggtggcttgggaaccgacccagtgatcatgcctactttcttctttgtatctccctccttcccagcccacccgggcagcagactctgatggaaggaaggtgccgtaggtgggcttttagaaactaacgggactggttttcaaagcagttatcttgggaaactgtttattccagcgatgtgacttttttcagaatatttcttggaatcatattcagagtctggggctgtgtgttgagcagccttaaggatgctagacactcatttagtgcccagggagtccagcgaatgacgtctgtggccaagcgaggtctcaggtgcaaagcaaaaggaccatttaaagtaaaatagcttggattcaatcatgtgacttttaaattggctcagaaagcaattttgtaatttcagagagtgttttgagccatggccacgttgtcattgtgagtctatagcttgactccttggagaacaatattcatttggttgtggagactgatttgctgggagaaatctgtcctgttactttctggtcatcccaggttctgacttttaccaggggcaaaaaaaaaaaaagcaagagggagataaatcccatctgtgagtttgtcttattggcgcctttttcctcagctgtcttccaagtattatttttactgttaaaaaattttttaaaaatgtgaaatgtaatgtttttacagcaacaatatgaaatatattttataaggaataaaatggtaccttgtctgattt

SEQ ID NO: 170 - protein, 315 aa, Homo sapiens
MRAGQQLASMLRWTRAWRLPREGLGPHGPSFARVPVAPSSSSGGRGGAEPRPLPLSYRLLDGEAALPAVVFLHGLFGSKTNFNSIAKILAQQTGRRVLTVDARNHGDSPHSPDMSYEIMSQDLQDLLPQLGLVPCVVVGHSMGGKTAMLLALQRPELVERLIAVDISPVESTGVSHFATYVAAMRAINIADELPRSRARKLADEQLSSVIQDMAVRQHLLTNLVEVDGRFVWRVNLDALTQHLDKILAFPQRQESYLGPTLFLLGGNSQFVHPSHHPEIMRLFPRAQMQTVPNAGHWIHADRPQDFIAAIRGFLV

SEQ ID NO: 171 - protein, 332 aa, Homo sapiens
MLLETQDALYVALELVIAALSVAGNVLVCAAVGTANTLQTPTNYFLVSLAAADVAVGLFAIPFAITISLGFCTDFYGCLFLACFVLVLTQSSIFSLLAVAVDRYLAICVPLRYKSLVTGTRARGVIAVLWVLAFGIGLTPFLGWNSKDSATNNCTEPWDGTTNESCCLVKCLFENVVPMSYMVYFNFFGCVLPPLLIMLVIYIKIFLVACRQLQRTELMDHSRTTLQREIHAAKSLAMIVGIFALCWLPVHAVNCVTLFQPAQGKNKPKWAMNMAILLSHANSVVNPIVYAYRNRDFRYTFHKIISRYLLCQADVKSGNGQAGVQPALGVGL

SEQ ID NO: 172 - protein, 344 aa, Homo sapiens
MAQKENSYPWPYGRQTAPSGLSTLPQRVLRKEPVTPSALVLMSRSNVQPTAAPGQKVMENSSGTPDILTRHFTIDDFEIGRPLGKGKFGNVYLAREKKSHFIVALKVLFKSQIEKEGVEHQLRREIEIQAHLHHPNILRLYNYFYDRRRIYLILEYAPRGELYKELQKSCTFDEQRTATIMEELADALMYCHGKKVIHRDIKPENLLLGLKGELKIADFGWSVHAPSLRRKTMCGTLDYLPPEMIEGRMHNEKVDLWCIGVLCYELLVGNPPFESASHNETYRRIVKVDLKFPASVPMGAQDLISKLLRHNPSERLPLAQVSAHPWVRANSRRVLPPSALQSVA

SEQ ID NO: 173 - protein, 165 aa, Homo sapiens
MGAPTLPPAWQPFLKDHRISTFKNWPFLEGCACTPERMAEAGFIHCPTENEPDLAQCFFCFKELEGWEPDDDPIGPGTVAYACNTSTLGGRGGRITREEHKKHSSGCAFLSVKKQFEELTLGEFLKLDRERAKNKIAKETNNKKKEFEETAEKVRRAIEQLAAMD

SEQ ID NO: 174 - protein, 146 aa, Homo sapiens
MLKEDCASELKVHLAKSLPLPSSVNRPRIDLIVFVVNLHSKYSLQNTEESLRHVDASFFLGKVCFLATGAGRESHCSIHRHTVVKLAHTYQSPLLYCDLEVEGFRATMAQRLVRVLQICAGHVPGVSALNLLSLLRSSEGPSLEDL

SEQ ID NO: 175 - protein, 956 aa, Homo sapiens
MLEELECGAPGARGAATAMDCKDRPAFPVKKLIQARLPFKRLNLVPKGKADDMSDDQGTSVQSKSPDLEASLDTLENNCHVGSDIDFRPKLVNGKGPLDNFLRNRIETSIGQSTVIIDLTEDSNEQPDSLVDHNKLNSEASPSREAINGQREDTGDQQGLLKAIQNDKLAFPGETLSDIPCKTEEEGVGCGGAGRRGDSQECSPRSCPELTSGPRMCPRKEQDSWSEAGGILFKGKVPMVVLQDILAVRPPQIKSLPATPQGKNMTPESEVLESFPEEDSVLSHSSLSSPSSTSSPEGPPAPPKQHSSTSPFPTSTPLRRITKKFVKGSTEKNKLRLQRDQERLGKQLKLRAEREEKEKLKEEAKRAKEEAKKKKEEEKELKEKERREKREKDEKEKAEKQRLKEERRKERQEALEAKLEEKRKKEEEKRLREEEKRIKAEKAEITRFFQKPKTPQAPKTLAGSCGKFAPFEIKEHMVLAPRRRTAFHPDLCSQLDQLLQQQSGEFSFLKDLKGRQPLRSGPTHVSTRNADIFNSDVVIVERGKGDGVPERRKFGRMKLLQFCENHRPAYWGTWNKKTALIRARDPWAQDTKLLDYEVDSDEEWEEEEPGESLSHSEGDDDDDMGEDEDEDDGFFVPHGYLSEDEGVTEECADPENHKVRQKLKAKEWDEFLAKGKRFRVLQPVKIGCVWAADRDCAGDDLKVLQQFAACFLETLPAQEEQTPKASKRERRDEQILAQLLPLLHGNVNGSKVIIREFQEHCRRGLLSNHTGSPRSPSTTYLHTPTPSEDAAIPSKSRLKRLISENSVYEKRPDFRMCWYVHPQVLQSFQQEHLPVPCQWSYVTSVPSAPKEDSGSVPSTGPSQGTPISLKRKSAGSMCITQFMKKRRHDGQIGAEDMDGFQADTEEEEEEEGDCMIVDVPDAAEVQAPCGAASGAGGGVGVDTGKATLTSSPLGAS

SEQ ID NO: 176 - protein, 656 aa, Homo sapiens
MADNLPTEFDVVIIGTGLPESILAAACSRSGQRVLHIDSRSYYGGNWASFSFSGLLSWLKEYQQNNDIGEESTVVWQDLIHETEEAITLRKKDETIQHTEAFCYASQDMEDNVEEIGALQKNPSLGVSNTFTEVLDSALPEESQLSYFNSDEMPAKHTQKSDTEISLEVTDVEESVEKEKYCGDKTCMHTVSDKDGDKDESKSTVEDKADEPIRNRITYSQIVKEGRRFNIDLVSKLLYSQGLLIDLLIKSDVSRYVEFKNVTRILAFREGKVEQVPCSRADVFNSKELTMVEKRMLMKFLTFCLEYEQHPDEYQAFRQCSFSEYLKTKKLTPNLQHFVLHSIAMTSESSCTTIDGLNATKNFLQCLGRFGNTPFLFPLYGQGEIPQGFCRMCAVFGGIYCLRHKVQCFVVDKESGRCKAIIDHFGQRINAKYFIVEDSYLSEETCSNVQYKQISRAVLITDQSILKTDLDQQTSILIVPPAEPGACAVRVTELCSSTMTCMKDTYLVHLTCSSSKTAREDLESVVKKLFTPYTETEINEEELTKPRLLWALYFNMRDSSGISRSSYNGLPSNVYVCSGPDCGLGNEHAVKQAETLFQEIFPTEEFCPPPPNPEDIIFDGDDKQPEAPGTNNVVMAKLESSEESKNLESPEKHLQN

SEQ ID NO: 177 - protein, 461 aa, Homo sapiens
MVSRVQLPPEIQLAQRLAGNEQVTRDRAVRKLRKYIVARTQRAAGGFTHDELLKVWKGLFYCMWMQDKPLLQEELGRTISQLVHAFQTTEAQHLFLQAFWQTMNREWTGIDRLRLDKFYMLMRMVLNESLKVLKMQGWEERQIEELLELLMTEILHPSSQAPNGVKSHFIEIFLEELTKVGAEELTADQNLKFIDPFCRIAARTKDSLVLNNITRGIFETIVEQAPLAIEDLLNELDTQDEEVASDSDESSEGGERGDALSQKRSEKPPAGSICRAEPEAGEEQAGDDRDSGGPVLQFDYEAVANRLFEMASRQSTPSQNRKRLYKVIRKLQDLAGGIFPEDEIPEKACRRLLEGRRQKKTKKQKRLLRLQQERGKGEKEPPSPGMERKRSRRRGVGADPEARAEAGEQPGTAERALLRDQPRGRGQRGARQRRRTPRPLTSARAKAANVQEPEKKKKRRE

SEQ ID NO: 178 - protein, 437 aa, Homo sapiens
MALAGAPAGGPCAPALEALLGAGALRLLDSSQIVIISAAQDASAPPAPTGPAAPAAGPCDPDLLLFATPQAPRPTPSAPRPALGRPPVKRRLDLETDHQYLAESSGPARGRGRHPGKGVKSPGEKSRYETSLNLTTKRFLELLSHSADGVVDLNWAAEVLKVQKRRIYDITNVLEGIQLIAKKSKNHIQWLGSHTTVGVGGRLEGLTQDLRQLQESEQQLDHLMNICTTQLRLLSEDTDSQRLAYVTCQDLRSIADPAEQMVMVIKAPPETQLQAVDSSENFQISLKSKQGPIDVFLCPEETVGGISPGKTPSQEVTSEEENRATDSATIVSPPPSSPPSSLTTDPSQSLLSLEQEPLLSRMGSLRAPVDEDRLSPLVAADSLLEHVREDFSGLLPEEFISLSPPHEALDYHFGLEEGEGIRDLFDCDFGDLTPLDF

SEQ ID NO: 179 - protein, 751 aa, Homo sapiens
MGQTGKKSEKGPVCWRKRVKSEYMRLRQLKRFRRADEVKSMFSSNRQKILERTEILNQEWKQRRIQPVHILTSVSSLRGTRECSVTSDLDFPTQVIPLKTLNAVASVPIMYSWSPLQQNFMVEDETVLHNIPYMGDEVLDQDGTFIEELIKNYDGKVHGDRECGFINDEIFVELVNALGQYNDDDDDDDGDDPEEREEKQKDLEDHRDDKESRPPRKFPSDKIFEAISSMFPDKGTAEELKEKYKELTEQQLPGALPPECTPNIDGPNAKSVQREQSLHSFHTLFCRRCFKYDCFLHRKCNYSFHATPNTYKRKNTETALDNKPCGPQCYQHLEGAKEFAAALTAERIKTPPKRPGGRRRGRLPNNSSRPSTPTINVLESKDTDSDREAGTETGGENNDKEEEEKKDETSSSSEANSRCQTPIKMKPNIEPPENVEWSGAEASMFRVLIGTYYDNFCAIARLIGTKTCRQVYEFRVKESSIIAPAPAEDVDTPPRKKKRKHRLWAAHCRKIQLKKDGSSNHVYNYQPCDHPRQPCDSSCPCVIAQNFCEKFCQCSSECQNRFPGCRCKAQCNTKQCPCYLAVRECDPDLCLTCGAADHWDSKNVSCKNCSIQRGSKKHLLLAPSDVAGWGIFIKDPVQKNEFISEYCGEIISQDEADRRGKVYDKYMCSFLFNLNNDFVVDATRKGNKIRFANHSVNPNCYAKVMMVNGDHRIGIFAKRAIQTGEELFFDYRYSQADALKYVGIEREMEIP

SEQ ID NO: 180 - protein, 380 aa, Homo sapiens
MGIQGLAKLIADVAPSAIRENDIKSYFGRKVAIDASMSIYQFLIAVRQGGDVLQNEEGETTSHLMGMFYRTIRMMENGIKPVYVFDGKPPQLKSGELAKRSERRAEAEKQLQQAQAAGAEQEVEKFTKRLVKVTKQHNDECKHLLSLMGIPYLDAPSEAEASCAALVKAGKVYAAATEDMDCLTFGSPVLMRHLTASEAKKLPIQEFHLSRILQELGLNQEQFVDLCILLGSDYCESIRGIGPKRAVDLIQKHKSIEEIVRRLDPNKYPVPENWLHKEAHQLFLEPEVLDPESVELKWSEPNEEELIKFMCGEKQFSEERIRSGVKRLSKSRQGSTQGRLDDFFKVTGSLSSAKRKEPEPKGSTKKKAKTGAAGKFKRGK

SEQ ID NO: 181 - protein, 271 aa, Homo sapiens
MFRDFGEPGPSSGNGGGYGGPAQPPAAAQAAQQKFHLVPSINTMSGSQELQWMVQPHFLGPSSYPRPLTYPQYSPPQPRPGVIRALGPPPGVRRRPCEQISPEEEERRRVRRERNKLAAAKCRNRRKELTDFLQAETDKLEDEKSGLQREIEELQKQKERLELVLEAHRPICKIPEGAKEGDTGSTSGTSSPPAPCRPVPCISLSPGPVLEPEALHTPTLMTTPSLTPFTPSLVFTYPSTPEPCASAHRKSSSSSGDPSSDPLGSPTLLAL

SEQ ID NO: 182 - protein, 801 aa, Homo sapiens
MKTSPRRPLILKRRRLPLPVQNAPSETSEEEPKRSPAQQESNQAEASKEVAESNSCKFPAGIKIINHPTMPNTQVVAIPNNANIHSIITALTAKGKESGSSGPNKFILISCGGAPTQPPGLRPQTQTSYDAKRTEVTLETLGPKPAARDVNLPRPPGALCEQKRETCADGEAAGCTINNSLSNIQWLRKMSSDGLGSRSIKQEMEEKENCHLEQRQVKVEEPSRPSASWQNSVSERPPYSYMAMIQFAINSTERKRMTLKDIYTWIEDHFPYFKHIAKPGWKNSIRHNLSLHDMFVRETSANGKVSFWTIHPSANRYLTLDQVFKPLDPGSPQLPEHLESQQKRPNPELRRNMTIKTELPLGARRKMKPLLPRVSSYLVPIQFPVNQSLVLQPSVKVPLPLAASLMSSELARHSKRVRIAPKVFGEQVVFGYMSKFFSGDLRDFGTPITSLFNFIFLCLSVLLAEEGIAPLSSAGPGKEEKLLFGEGFSPLLPVQTIKEEEIQPGEEMPHLARPIKVESPPLEEWPSPAPSFKEESSHSWEDSSQSPTPRPKKSYSGLRSPTRCVSEMLVIQHRERRERSRSRRKQHLLPPCVDEPELLFSEGPSTSRWAAELPFPADSSDPASQLSYSQEVGGPFKTPIKETLPISSTPSKSVLPRTPESWRLTPPAKVGGLDFSPVQTSQGASDPLPDPLGLMDLSTTPLQSAPPLESPQRLLSSEPLDLISVPFGNSSPSDIDVPKPGSPEPQVSGLAANRSLTEGLVLDTMNDSLSKILLDISFPGLDEDPLGPDNINWSQFIPELQ

SEQ ID NO: 183 - protein, 128 aa, Homo sapiens
MAGGKAGKDSGKAKTKAVSRSQRAGLQFPVGRIHRHLKSRTTSHGRVGATAAVYSAAILEYLTAEVLELAGNASKDLKVKRITPRHLQLAIRGDEELDSLIKATIAGGGVIPHIHKSLIGKKGQQKTV

SEQ ID NO: 184 - protein, 297 aa, Homo sapiens
MQRARPTLWAAALTLLVLLRGPPVARAGASSAGLGPVVRCEPCDARALAQCAPPPAVCAELVREPGCGCCLTCALSEGQPCGIYTERCGSGLRCQPSPDEARPLQALLDGRGLCVNASAVSRLRAYLLPAPPAPGEPPAPGNASESEEDRSAGSVESPSVSSTHRVSDPKFHPLHSKIIIIKKGHAKDSQRYKVDYESQSTDTQNFSSESKRETEYGPCRREMEDTLNHLKFLNVLSPRGVHIPNCDKKGFYKKKQCRPSKGRKRGFCWCVDKYGQPLPGYTTKGKEDVHCYSMQSK

SEQ ID NO: 185 - protein, 855 aa, Homo sapiens
MDEEEDNLSLLTALLEENESALDCNSEENNFLTRENGEPDAFDELFDADGDGESYTEEADDGETGETRDEKENLATLFGDMEDLTDEEEVPASQSTENRVLPAPAPRREKTNEELQEELRNLQEQMKALQEQLKVTTIKQTASPARLQKSPEKSPRPPLKERRVQRIQESTCFSAELDVPALPRTKRVARTPKASPPDPKSSSSRMTSAPSQPLQTISRNKPSGITRGQIVGTPGSSGETTQPICVEAFSGLRLRRPRVSSTEMNKKMTGRKLIRLSQIKEKMAREKLEEIDWVTFGVILKKVTPQSVNSGKTFSIWKLNDLRDLTQCVSLFLFGEVHKALWKTEQGTVVGILNANPMKPKDGSEEVCLSIDHPQKVLIMGEALDLGTCKAKKKNGEPCTQTVNLRDCEYCQYHVQAQYKKLSAKRADLQSTFSGGRIPKKFARRGTSLKERLCQDGFYYGGVSSASYAASIAAAVAPKKKIQTTLSNLVVKGTNLIIQETRQKLGIPQKSLSCSEEFKELMDLPTCGARNLKQHLAKATASGIMGSPKPAIKSISASALLKQQKQRMLEMRRRKSEEIQKRFLQSSSEVESPAVPSSSRQPPAQPPRTGSEFPRLEGAPATMTPKLGRGVLEGDDVLFYDESPPPRPKLSALAEAKKLAAITKLRAKGQVLTKTNPNSIKKKQKDPQDILEVKERVEKNTMFSSQAEDELEPARKKRREQLAYLESEEFQKILKAKSKHTGILKEAEAEMQERYFEPLVKKEQMEEKMRNIREVKCRVVTCKTCAYTHFKLLETCVSEQHEYHWHDGVKRFFKCPCGNRSISLDRLPNKHCSNCGLYKWERDGMLKVCHLRTNF

SEQ ID NO: 186 - protein, 904 aa, Homo sapiens
MAESSESFTMASSPAQRRRGNDPLTSSPGRSSRRTDALTSSPGRDLPPFEDESEGLLGTEGPLEEEEDGEELIGDGMERDYRAIPELDAYEAEGLALDDEDVEELTASQREAAERAMRQRDREAGRGLGRMRRGLLYDSDEEDEERPARKRRQVERATEDGEEDEEMIESIENLEDLKGHSVREWVSMAGPRLEIHHRFKNFLRTHVDSHGHNVFKERISDMCKENRESLVVNYEDLAAREHVLAYFLPEAPAELLQIFDEAALEVVLAMYPKYDRITNHIHVRISHLPLVEELRSLRQLHLNQLIRTSGVVTSCTGVLPQLSMVKYNCNKCNFVLGPFCQSQNQEVKPGSCPECQSAGPFEVNMEETIYQNYQRIRIQESPGKVAAGRLPRSKDAILLADLVDSCKPGDEIELTGIYHNNYDGSLNTANGFPVFATVILANHVAKKDNKVAVGELTDEDVKMITSLSKDQQIGEKIFASIAPSIYGHEDIKRGLALALFGGEPKNPGGKHKVRGDINVLLCGDPGTAKSQFLKYIEKVSSRAIFTTGQGASAVGLTAYVQRHPVSREWTLEAGALVLADRGVCLIDEFDKMNDQDRTSIHEAMEQQSISISKAGIVTSLQARCTVIAAANPIGGRYDPSLTFSENVDLTEPIISRFDILCVVRDTVDPVQDEMLARFVVGSHVRHHPSNKEEEGLANGSAAEPAMPNTYGVEPLPQEVLKKYIIYAKERVHPKLNQMDQDKVAKMYSDLRKESMATGSIPITVRHIESMIRMAEAHARIHLRDYVIEDDVNMAIRVMLESFIDTQKFSVMRSMRKTFARYLSFRRDNNELLLFILKQLVAEQVTYQRNRFGAQQDTIEVPEKDLVDKARQINIHNLSAFYDSELFRMNKFSHDLKRKMILQQF

SEQ ID NO: 187 - protein, 582 aa, Homo sapiens
MAARSWQDELAQQAEEGSARLREMLSVGLGFLRTELGLDLGLEPKRYPGWVILVGTGALGLLLLFLLGYGWAAACAGARKKRRSPPRKREEAAAVPAAAPDDLALLKNLRSEEQKKKNRKKLSEKPKPNGRTVEVAEGEAVRTPQSVTAKQPPEIDKKNEKSKKNKKKSKSDAKAVQNSSRHDGKEVDEGAWETKISHREKRQQRKRDKVLTDSGSLDSTIPGIENTITVTTEQLTTASFPVGSKKNKGDSHLNVQVSNFKSGKGDSTLQVSSGLNENLTVNGGGWNEKSVKLSSQISAGEEKWNSVSPASAGKRKTEPSAWSQDTGDANTNGKDWGRSWSDRSIFSGIGSTAEPVSQSTTSDYQWDVSRNQPYIDDEWSGLNGLSSADPNSDWNAPAEEWGNWVDEERASLLKSQEPIPDDQKVSDDDKEKGEGALPTGKSKKKKKKKKKQGEDNSTAQDTEELEKEIREDLPVNTSKTRPKQEKAFSLKTISTSDPAEVLVKNSQPIKTLPPATSTEPSVILSKSDSDKSSSQVPPILQETDKSKSNTKQNSVPPSQTKSETSWESPKQIKKKKKARRET

SEQ ID NO: 188 - protein, 432 aa, Homo sapiens
MATAEVLNIGKKLYEGKTKEVYELLDSPGKVLLQSKDQITAGNAARKNHLEGKAAISNKITSCIFQLLQEAVTSYKSNRIKTAFTRKCGETAFIAPQCEMIPIEWVCRRIATGSFLKRNPGVKEGYKFYPPKVELFFKDDANNDPQWSEEQLIAAKFCFAGLLIGQTEVDIMSHATQAIFEILEKSWLPQNCTLVDMKIEFGVDVTTKEIVLADVIDNDSWRLWPSGDRSQQKDKQSYRDLKEVTPEGLQMVKKNFEWVAERVELLLKSESQCRVVVLMGSTSDLGHCEKIKKACGNFGIPCELRVTSAHKGPDETLRIKAEYEGDGIPTVFVAVAGRSNGLGPVMSGNTAYPVISCPPLTPDWGVQDVWSSLRLPSGLGCSTVLSPEGSAQFAAQIFGLSNHLVWSKLRASILNTWISLKQADKKIRECNL

SEQ ID NO: 189 - protein, 196 aa, Homo sapiens
MDDTLFQLKFTAKQLEKLAKKAEKDSKAEQAKVKKALLQKNVECARVYAENAIRKKNEGVNWLRMASRVDAVASKVQTAVTMKGVTKNMAQVTKALDKALSTMDLQKVSSVMDRFEQQVQNLDVHTSVMEDSMSSATTLTTPQEQVDSLIMQIAEENGLEVLDQLSQLPEGASAVGESSVRSQEDQLSRRLAALRN

SEQ ID NO: 190 - protein, 401 aa, Homo sapiens
MRRAPAAERLLELGFPPRCGRQEPPFPLGVTRGWGRWPIQKRREGARPVPFSERSQEDGRGPAARSSGTLWRIRTRLSLCRDPEPPPPLCLLRVSLLCALRAGGRGSRWGEDGARLLLLPPARAAGNGEAEPSGGPSYAGRMLESSGCKALKEGVLEKRSDGLLQLWKKKCCILTEEGLLLIPPKQLQHQQQQQQQQQQQQQQQPGQGPAEPSQPSGPAVASLEPPVKLKELHFSNMKTVDCVERKGKYMYFTVVMAEGKEIDFRCPQDQGWNAEITLQMVQYKNRQAILAVKSTRQKQQHLVQQQPPSQPQPQPQLQPQPQPQPQPQPQPQSQPQPQPQPKPQPQQLHPYPHPHPHPHSHPHSHPHPHPHPHPHQIPHPHPQPHSQPHGHRLLRSTSNSA

SEQ ID NO: 191 - protein, 529 aa, Homo sapiens
MMIKETSLRRDPDLRGELAFLARGCDFVLPSRFKKRLKSFQQTQIQNKPEKKPGTPLPPPATSPSSPRPLSPVPHVNNVVNAPLSINIPRFYFPEGLPDTCSNHEQTLSRIETAFMDIEEQKADIYEMGKIAKVCGCPLYWKAPMFRAAGGEKTGFVTAQSFIAMWRKLLNNHHDDASKFICLLAKPNCSSLEQEDFIPLLQDVVDTHPGLTFLKDAPEFHSRYITTVIQRIFYTVNRSWSGKITSTEIRKSNFLQTLALLEEEEDINQITDYFSYEHFYVIYCKFWELDTDHDLYISQADLSRYNDQASSSRIIERIFSGAVTRGKTIQKEGRMSYADFVWFLISEEDKRNPTSIEYWFRCMDVDGDGVLSMYELEYFYEEQCERMEAMGIEPLPFHDLLCQMLDLVKPAVDGKITLRDLKRCRMAHIFYDTFFNLEKYLDHEQRDPFAVQKDVENDGPEPSDWDRFAAEEYETLVAEESAQAQFQEGFEDYETDEPASPSEFGNKSNKILSASLPEKCGKLQSVDEE

SEQ ID NO: 192 - protein, 152 aa, Homo sapiens
MPAHSLVMSSPALPAFLLCSTLLVIKMYVVAIITGQVRLRKKAFANPEDALRHGGPQYCRSDPDVERCLRAHRNDMETIYPFLFLGFVYSFLGPNPFVAWMHFLVFLVGRVAHTVAYLGKLRAPIRSVTYTLAQLPCASMALQILWEAARHL

SEQ ID NO: 193 - protein, 173 aa, Homo sapiens
MARMNRPAPVEVTYKNMRFLITHNPTNATLNKFIEELKKYGVTTIVRVCEATYDTTLVEKEGIHVLDWPFDDGAPPSNQIVDDWLSLVKIKFREEPGCCIAVHCVAGLGRAPVLVALALIEGGMKYEDAVQFIRQKRRGAFNSKQLLYLEKYRPKMRLRFKDSNGHRNNCCIQ

SEQ ID NO: 194 - protein, 359 aa, Homo sapiens
MPAHLLQDDISSSYTTTTTITAPPSRVLQNGGDKLETMPLYLEDDIRPDIKDDIYDPTYKDKEGPSPKVEYVWRNIILMSLLHLGALYGITLIPTCKFYTWLWGVFYYFVSALGITAGAHRLWSHRSYKARLPLRLFLIIANTMAFQNDVYEWARDHRAHHKFSETHADPHNSRRGFFFSHVGWLLVRKHPAVKEKGSTLDLSDLEAEKLVMFQRRYYKPGLLMMCFILPTLVPWYFWGETFQNSVFVATFLRYAVVLNATWLVNSAAHLFGYRPYDKNISPRENILVSLGAVGEGFHNYHHSFPYDYSASEYRWHINFTTFFIDCMAALGLAYDRKKVSKAAILARIKRTGDGNYKSG

SEQ ID NO: 195 - protein, 696 aa, Homo sapiens
MAAYERRFPTCPLIPMFVGSDTVNEFKSEDGAIHVIERRCKLDVDAPRLLKKIAGVDYVYFVQKNSLNSRERTLHIEAYNETFSNRVIINEHCCYTVHPENEDWTCFEQSASLDIKSFFGFESTVEKIAMKQYTSNIKKGKEIIEYYLRQLEEEGITFVPRWSPPSITTSSETSSSSSKKQAASMAVVIPEAALKEGLSGDALSSPSAPEPVVGTPDDKLDADYIKRYLGDLTPLQESCLIRLRQWLQETHKGKIPKDEHILRFLRARDFNIDKAREIMCQSLTWRKQHQVDYILETWTPPQVLQDYYAGGWHHHDKDGRPLYVLRLGQMDTKGLVRALGEEALLRYVLSINEEGLRRCEENTKVFGRPISSWTCLVDLEGLNMRHLWRPGVKALLRIIEVVEANYPETLGRLLILRAPRVFPVLWTLVSPFIDDNTRRKFLIYAGNDYQGPGGLLDYIDKEIIPDFLSGECMCEVPEGGLVPKSLYRTAEELENEDLKLWTETIYQSASVFKGAPHEILIQIVDASSVITWDFDVCKGDIVFNIYHSKRSPQPPKKDSLGAHSITSPGGNNVQLIDKVWQLGRDYSMVESPLICKEGESVQGSHVTRWPGFYILQWKFHSMPACAASSLPRVDDVLASLQVSSHKCKVMYYTEVIGSEDFRGSMTSLESSHSGFSQLSAATTSSSQSHSSSMISR

SEQ ID NO: 196 - protein, 248 aa, Homo sapiens [sequence omitted]

SEQ ID NO: 197 - protein, 368 aa, Homo sapiens
MSVAGLKKQFYKASQLVSEKVGGAEGTKLDDDFKEMEKKVDVTSKAVTEVLARTIEYLQPNPASRAKLTMLNTVSKIRGQVKNPGYPQSEGLLGECMIRHGKELGGESNFGDALLDAGESMKRLAEVKDSLDIEVKQNFIDPLQNLCEKDLKEIQHHLKKLEGRRLDFDYKKKRQGKIPDEELRQALEKFEESKEVAETSMHNLLETDIEQVSQLSALVDAQLDYHRQAVQILDELAEKLKRRMREASSRPKREYKPKPREPFDLGEPEQSNGGFPCTTAPKIAASSSFRSSDKPIRTPSRSMPPLDQPSCKALYDFEPENDGELGFHEGDVITLTNQIDENWYEGMLDGQSGFFPLSYVEVLVPLPQ

SEQ ID NO: 198 - protein, 938 aa, Homo sapiens
MTCLSHPLQLEVTADLAERRRIRSAIRELQRQELEREEEALASKRFRAERQDNKENWLHSQQREAEQRAALARLAGQLESMNDVEELTALLRSAGEYEERKLIRAAIRRVRAQEIEAATLAGRLYSGRPNSGSREDSKGLAAHRLEQCEVPEREEQEQQAEVSKPTPTPEGTSQDVTTVTLLLRAPPGSTSSSPASPSSSPTPASPEPPLEPAEAQCLTAEVPGSPEPPPSPPKTTSPEPQESPTLPSTEGQVVNKLLSGPKETPAAQSPTRGPSDTKRADVAGPRPCQRSLSVLSPRQPAQNRESTPLASGPSSFQRAGSVRDRVHKFTSDSPMAARLQDGTPQAALSPLTPARLLGPSLTSTTPASSSSGSSSRGPSDTSSRFSKEQRGVAQPLAQLRSCPQEEGPRGRGLAARPLENRAGGPVARSEEPGAPLPVAVGTAEPGGSMKTTFTIEIKDGRGQASTGRVLLPTGNQRAELTLGLRAPPTLLSTSSGGKSTITRVNSPGTLARLGSVTHVTSFSHAPPSSRGGCSIKAAEDAGTPVAHPPAFSTRRRSSTGTTRSTSLMEAEPAEPLAAAVEAANGAEQTRVNKAPEGRSPLSAEELMTIEDEGVLDKMLDQSTDFEERKLIRAALRELRQRKRDQRDKERERRLQEARGRPGEGRGNTATETTTRHSQRAADGSAVSTVTKTERLVHSNDGTRTARTTTVESSFVRRSENGSGSTMMQTKTFSSSSSSKKMGSIFDREDQASPRAGSLAALEKRQAEKKKELMKAQSLPKTSASQARKAMIEKLEKEGAAGSPGGPRAAVQRSTSFGVPNANSIKQMLLDWCRAKTRGYEHVDIQNFSSSWSDGMAFCALVHNFFPEAFDYGQLSPQNRRQNFEVAFSSAETHADCPQLLDTEDMVRLREPDWKCVYTYIQEFYRCLVQKGLVKTKKS

SEQ ID NO: 199 - protein, 239 aa, Homo sapiens
  misc_feature (1)..(1): Xaa can be any naturally occurring amino acid
XLLQEENEELRRRLASATRRTEALERELEIGQDCLELELGQSREELDKFKDKFRRLQNSYTASQRTNQELEDKLHTLIKKAEMDRKTLDWEIVELTNKLLDAKNTINKLEELNERYRLDCNLAVQLLKCNKSHFRNHKFADVSRTHPLPAHIDHSGHCRTPLTPVSAPLSVLLFPLCPPLASMSPLKPVNSATGWCPVYCPGPITSSGGPALLVSVTETEREDPGQEGEGSQSYLPKEY

SEQ ID NO: 200 - protein, 212 aa, Homo sapiens
MGVTCVSQMPVAEGKSVQQTVELLTRKLEMLGAEKQGTFCVDCETYHTAASTLGSQGQTGKLMYVMHNSEYPLSCFALFENGPCLIADTNFDVLMVKLKGFFQSAKASKIETRGTRYQYCDFLVKVGTVTMGPSARGISVEVEYGPCVVASDCWSLLLEFLQSFLGSHTPGAPAVFGNRHDAVYGPADTMVQYMELFNKIRKQQQVPVAGIR

SEQ ID NO: 201 - protein, 559 aa, Homo sapiens
MSATSVDTQRTKGQDNKVQNGSLHQKDTVHDNDFEPYLTGQSNQSNSYPSMSDPYLSSYYPPSIGFPYSLNEAPWSTAGDPPIPYLTTYGQLSNGDHHFMHDAVFGQPGGLGNNIYQHRFNFFPENPAFSAWGTSGSQGQQTQSSAYGSSYTYPPSSLGGTVVDGQPGFHSDTLSKAPGMNSLEQGMVGLKIGDVSSSAVKTVGSVVSSVALTGVLSGNGGTNVNMPVSKPTSWAAIASKPAKPQPKMKTKSGPVMGGGLPPPPIKHNMDIGTWDNKGPVPKAPVPQQAPSPQAAPQPQQVAQPLPAQPPALAQPQYQSPQQPPQTRWVAPRNRNAAFGQSGGAGSDSNSPGNVQPNSAPSVESHPVLEKLKAAHSYNPKEFEWNLKSGRVFIIKSYSEDDIHRSIKYSIWCSTEHGNKRLDSAFRCMSSKGPVYLLFSVNGSGHFCGVAEMKSPVDYGTSAGVWSQDKWKGKFDVQWIFVKDVPNNQLRHIRLENNDNKPVTNSRDTQEVPLEKAKQVLKIISSYKHTTSIFDDFAHYEKRQEEEEVVRKERQSRNKQ

SEQ ID NO: 202 - protein, 428 aa, Homo sapiens
MITGVFSMRLWTPVGVLTSLAYCLHQRRVALAELQEADGQCPVDRSLLKLKMVQVVFRHGARSPLKPLPLEEQVEWNPQLLEVPPQTQFDYTVTNLAGGPKPYSPYDSQYHETTLKGGMFAGQLTKVGMQQMFALGERLRKNYVEDIPFLSPTFNPQEVFIRSTNIFRNLESTRCLLAGLFQCQKEGPIIIHTDEADSEVLYPNYQSCWSLRQRTRGRRQTASLQPGISEDLKKVKDRMGIDSSDKVDFFILLDNVAAEQAHNLPSCPMLKRFARMIEQRAVDTSLYILPKEDRESLQMAVGPFLHILESNLLKAVDSATAPDKIRKLYLYAAHDVTFIPLLMTLGIFDHKWPPFAVDLTMELYQHLESKEWFVQLYYHGKEQVPRGCPDGLCPLDMFLNAMSVYTLSPEKYHALCSQTQVMEVGNEE

SEQ ID NO: 203 - protein, 683 aa, Homo sapiens
MLFIFNFLFSPLPTPALICILTFGAAIFLWLITRPQPVLPLLDLNNQSVGIEGGARKGVSQKNNDLTSCCFSDAKTMYEVFQRGLAVSDNGPCLGYRKPNQPYRWLSYKQVSDRAEYLGSCLLHKGYKSSPDQFVGIFAQNRPEWIISELACYTYSMVAVPLYDTLGPEAIVHIVNKADIAMVICDTPQKALVLIGNVEKGFTPSLKVIILMDPFDDDLKQRGEKSGIEILSLYDAENLGKEHFRKPVPPSPEDLSVICFTSGTTGDPKGAMITHQNIVSNAAAFLKCVEHAYEPTPDDVAISYLPLAHMFERIVQAVVYSCGARVGFFQGDIRLLADDMKTLKPTLFPAVPRLLNRIYDKVQNEAKTPLKKFLLKLAVSSKFKELQKGIIRHDSFWDKLIFAKIQDSLGGRVRVIVTGAAPMSTSVMTFFRAAMGCQVYEAYGQTECTGGCTFTLPGDWTSGHVGVPLACNYVKLEDVADMNYFTVNNEGEVCIKGTNVFKGYLKDPEKTQEALDSDGWLHTGDIGRWLPNGTLKIIDRKKNIFKLAQGEYIAPEKIENIYNRSQPVLQIFVHGESLRSSLVGVVVPDTDVLPSFAAKLGVKGSFEELCQNQVVREAILEDLQKIGKESGLKTFEQVKAIFLHPEPFSIENGLLTPTLKAKRGELSKYFRTQIDSLYEHIQD

SEQ ID NO: 204 - protein, 914 aa, Homo sapiens
MDHYDSQQTNDYMQPEEDWDRDLLLDPAWEKQQRKTFTAWCNSHLRKAGTQIENIEEDFRDGLKLMLLLEVISGERLAKPERGKMRVHKISNVNKALDFIASKGVKLVSIGAEEIVDGNVKMTLGMIWTIILRFAIQDISVEETSAKEGLLLWCQRKTAPYKNVNIQNFHISWKDGLGFCALIHRHRPELIDYGKLRKDDPLTNLNTAFDVAEKYLDIPKMLDAEDIVGTARPDEKAIMTYVSSFYHAFSGAQKAETAANRICKVLAVNQENEQLMEDYEKLASDLLEWIRRTIPWLENRVPENTMHAMQQKLEDFRDYRRLHKPPKVQEKCQLEINFNTLQTKLRLSNRPAFMPSEGRMVSDINNAWGCLEQVEKGYEEWLLNEIRRLERLDHLAEKFRQKASIHEAWTDGKEAMLRQKDYETATLSEIKALLKKHEAFESDLAAHQDRVEQIAAIAQELNELDYYDSPSVNARCQKICDQWDNLGALTQKRREALERTEKLLETIDQLYLEYAKRAAPFNNWMEGAMEDLQDTFIVHTIEEIQGLTTAHEQFKATLPDADKERLAILGIHNEVSKIVQTYHVNMAGTNPYTTITPQEINGKWDHVRQLVPRRDQALTEEHARQQHNERLRKQFGAQANVIGPWIQTKMEEIGRISIEMHGTLEDQLSHLRQYEKSIVNYKPKIDQLEGDHQLIQEALIFDNKHTNYTMEHIRVGWEQLLTTIARTINEVENQILTRDAKGISQEQMNEFRASFNHFDRDHSGTLGPEEFKACLISLGYDIGNDPQKKTGMMDTDDFRACLISMGYNMGEAEFARIMSIVDPNRLGVVTFQAFIDFMSRETADTDTADQVMASFKILAGDKNYITMDELRRELPPDQAEYCIARMAPYTGPDSVPGALDYMSFSTALYGESDL

SEQ ID NO: 205 - protein, 264 aa, Homo sapiens
MCHKNGFPQEGGITAAFLQKRKLRLSKNHRPARAKVTEHVRGTRPGRATAGPAASTRAAGSLFFDRWGNRGPAGCRGSSHLPQQLKFTTSDSCDRIKDEFQLLQAQYHSLKLECDKLASEKSEMQRHYVMYYEMSYGLNIEMHKQAEIVKRLNGICAQVLPYLSQEHQQQVLGAIERAKQVTAPELNSIIRQQLQAHQLSQLQALALPLTPLPVGLQPPSLPAVSAGTGLLSLSALGSQAHLSKEDKNGHDGDTHQEDDGEKSD

SEQ ID NO: 206 - protein, 481 aa, Homo sapiens
MNEVSVIKEGWLHKRGEYIKTWRPRYFLLKSDGSFIGYKERPEAPDQTLPPLNNFSVAECQLMKTERPRPNTFVIRCLQWTTVIERTFHVDSPDEREEWMRAIQMVANSLKQRAPGEDPMDYKCGSPSDSSTTEEMEVAVSKARAKVTMNDFDYLKLLGKGTFGKVILVREKATGRYYAMKILRKEVIIAKDEVAHTVTESRVLQNTRHPFLTALKYAFQTHDRLCFVMEYANGGELFFHLSRERVFTEERARFYGAEIVSALEYLHSRDVVYRDIKLENLMLDKDGHIKITDFGLCKEGISDGATMKTFCGTPEYLAPEVLEDNDYGRAVDWWGLGVVMYEMMCGRLPFYNQDHERLFELILMEEIRFPRTLSPEAKSLLAGLLKKDPKQRLGGGPSDAKEVMEHRFFLSINWQDVVQKKLLPPFKPQVTSEVDTRYFDDEFTAQSITITPPDRYDSLGLLELDQRTHFPQFSYSASIRE

SEQ ID NO: 207 - protein, 822 aa, Homo sapiens
MAAAVVVAEGDSDSRPGQELLVAWNTVSTGLVPPAALGLVSSRTSGAVPPKEEELRAAVEVLRGHGLHSVLEEWFVEVLQNDLQANISPEFWNAISQCENSADEPQCLLLLLDAFGLLESRLDPYLRSLELLEKWTRLGLLMGTGAQGLREEVHTMLRGVLFFSTPRTFQEMIQRLYGCFLRVYMQSKRKGEGGTDPELEGELDSRYARRRYYRLLQSPLCAGCSSDKQQCWCRQALEQFHQLSQVLHRLSLLERVSAEAVTTTLHQVTRERMEDRCRGEYERSFLREFHKWIERVVGWLGKVFLQDGPARPASPEAGNTLRRWRCHVQRFFYRIYASLRIEELFSIVRDFPDSRPAIEDLKYCLERTDQRQQLLVSLKAALETRLLHPGVNTCDIITLYISAIKALRVLDPSMVILEVACEPIRRYLRTREDTVRQIVAGLTGDSDGTGDLAVELSKTDPASLETGQDSEDDSGEPEDWVPDPVDADPGKSSSKRRSSDIISLLVSIYGSKDLFINEYRSLLADRLLHQFSFSPEREIRNVELLKLRFGEAPMHFCEVMLKDMADSRRINANIREEDEKRPAEEQPPFGVYAVILSSEFWPPFKDEKLEVPEDIRAALEAYCKKYEQLKAMRTLSWKHTLGLVTMDVELADRTLSVAVTPVQAVILLYFQDQASWTLEELSKAVKMPVALLRRRMSVWLQQGVLREEPPGTFSVIEEERPQDRDNMVLIDSDDESDSGMASQADQKEEELLLFWTYIQAMLTNLESLSLDRIYNMLRMFVVTGPALAEIDLQELQGYLQKKVRDQQLVYSAGVYRLPKNCS

SEQ ID NO: 208 - protein, 488 aa, Homo sapiens
MSYPGYPPTGYPPFPGYPPAGQESSFPPSGQYPYPSGFPPMGGGAYPQVPSSGYPGAGGYPAPGGYPAPGGYPGAPQPGGAPSYPGVPPGQGFGVPPGGAGFSGYPQPPSQSYGGGPAQVPLPGGFPGGQMPSQYPGGQPTYPSQINTDSFSSYPVFSPVSLDYSSEPATVTQVTQGTIRPAANFDAIRDAEILRKAMKGFGTDEQAIVDVVANRSNDQRQKIKAAFKTSYGKDLIKDLKSELSGNMEELILALFMPPTYYDAWSLRKAMQGAGTQERVLIEILCTRTNQEIREIVRCYQSEFGRDLEKDIRSDTSGHFERLLVSMCQGNRDENQSINHQMAQEDAQRLYQAGEGRLGTDESCFNMILATRSFPQLRATMEAYSRMANRDLLSSVSREFSGYVESGLKTILQCALNRPAFFAERLYYAMKGAGTDDSTLVRIVVTRSEIDLVQIKQMFAQMYQKTLGTMIAGDTSGDYRRLLLAIVGQ

SEQ ID NO: 209 - protein, 257 aa, Homo sapiens
MTAAVFFGCAFIAFGPALALYVFTIATEPLRIIFLIAGAFFWLVSLLISSLVWFMARVIIDNKDGPTQKYLLIFGAFVSVYIQEMFRFAYYKLLKKASEGLKSINPGETAPSMRLLAYVSGLGFGIMSGVFSFVNTLSDSLGPGTVGIHGDSPQFFLYSAFMTLVIILLHVFWGIVFFDGCEKKKWGILLIVLLTHLLVSAQTFISSYYGINLASAFIILVLMGTWAFLAAGGSCRSLKLCLLCQDKNFLLYNQRSR

SEQ ID NO: 210 - protein, 188 aa, Homo sapiens
MDVNIAPLRAWDDFFPGSDRFARPDFRDISKWNNRVVSNLLYYQTNYLVVAAMMISIVGFLSPFNMILGGIVVVLVFTGFVWAAHNKDVLRRMKKRYPTTFVMVVMLASYFLISMFGGVMVFVFGITFPLLLMFIHASLRLRNLKNKLENKMEGIGLKRTPMGIVLDALEQQEEGINRLTDYISKVKE

SEQ ID NO: 211 - protein, 151 aa, Homo sapiens
MSKNTVSSARFRKVDVDEYDENKFVDEEDGGDGQAGPDEGEVDSCLRQGNMTAALQAALKNPPINTKSQAVKDRAGSIVLKVLISFKANDIEKAVQSLDKNGVDLLMKYIYKGFESPSDNSSAMLLQWHEKALAAGGVGSIVRVLTARKTV

SEQ ID NO: 212 - protein, 303 aa, Homo sapiens
MARGKAKEEGSWKKFIWNSEKKEFLGRTGGSWFKILLFYVIFYGCLAGIFIGTIQVMLLTISEFKPTYQDRVAPPGLTQIPQIQKTEISFRPNDPKSYEAYVLNIVRFLEKYKDSAQRDDMIFEDCGDVPSEPKERGDFNHERGERKVCRFKLEWLGNCSGLNDETYGYKEGKPCIIIKLNRVLGFKPKPPKNESLETYPVMKYNPNVLPVQCTGKRDEDKDKVGNVEYFGLGNSPGFPLQYYPYYGKLLQPKYLQPLLAVQFTNLTMDTEIRIECKAYGENIGYSEKDRFQGRFDVKIEVKS

SEQ ID NO: 213 - protein, 1047 aa, Homo sapiens
MTDNIPLQPVRQKKRMDSRPRAGCCEWLRCCGGGEARPRTVWLGHPEKRDQRYPRNVINNQKYNFFTFLPGVLFNQFKYFFNLYFLLLACSQFVPEMRLGALYTYWVPLGFVLAVTVIREAVEEIRCYVRDKEVNSQVYSRLTARGTVKVKSSNIQVGDLIIVEKNQRVPADMIFLRTSEKNGSCFLRTDQLDGETDWKLRLPVACTQRLPTAADLLQIRSYVYAEEPNIDIHNFVGTFTREDSDPPISESLSIENTLWAGTVVASGTVVGVVLYTGRELRSVMNTSNPRSKIGLFDLEVNCLTKILFGALVVVSLVMVALQHFAGRWYLQIIRFLLLFSNIIPISLRVNLDMGKIVYSWVIRRDSKIPGTVVRSSTIPEQLGRISYLLTDKTGTLTQNEMIFKRLHLGTVAYGLDSMDEVQSHIFSIYTQQSQDPPAQKGPTLTTKVRRTMSSRVHEAVKAIALCHNVTPVYESNGVTDQAEAEKQYEDSCRVYQASSPDEVALVQWTESVGLTLVGRDQSSMQLRTPGDQILNFTILQIFPFTYESKRMGIIVRDESTGEITFYMKGADVVMAGIVQYNDWLEEECGNMAREGLRVLVVAKKSLAEEQYQDFEARYVQAKLSVHDRSLKVATVIESLEMEMELLCLTGVEDQLQADVRPTLETLRNAGIKVWMLTGDKLETATCTAKNAHLVTRNQDIHVFRLVTNRGEAHLELNAFRRKHDCALVISGDSLEVCLKYYEYEFMELACQCPAVVCCRCAPTQKAQIVRLLQERTGKLTCAVGDGGNDVSMIQESDCGVGVEGKEGKQASLAADFSITQFKHLGRLLMVHGRNSYKRSAALSQFVIHRSLCISTMQAVFSSVFYFASVPLYQGFLIIGYSTIYTMFPVFSLVLDKDVKSEVAMLYPELYKDLLKGRPLSYKTFLIWVLISIYQGSTIMYGALLLFESEFVHIVAISFTSLILTELLMVALTIQTWHWLMTVAELLSLACYIASLVFLHEFIDVYFIATLSFLWKVSVITLVSCLPLYVLKYLRRRFSPPSYSKLTS

SEQ ID NO: 214 - protein, 388 aa, Homo sapiens
MRARRGLLRLPRRSLLAALFFFSLSSSLLYFVYVAPGIVNTYLFMMQAQGILIRDNVRTIGAQVYEQVLRSAYAKRNSSVNDSDYPLDLNHSETFLQTTTFLPEDFTYFANHTCPERLPSMKGPIDINMSEIGMDYIHELFSKDPTIKLGGHWKPSDCMPRWKVAILIPFRNRHEHLPVLFRHLLPMLQRQRLQFAFYVVEQVGTQPFNRAMLFNVGFQEAMKDLDWDCLIFHDVDHIPESDRNYYGCGQMPRHFATKLDKYMYLLPYTEFFGGVSGLTVEQFRKINGFPNAFWGWGGEDDDLWNRVQNAGYSVSRPEGDTGKYKSIPHHHRGEVQFLGRYALLRKSKERQGLDGLNNLNYFANITYDALYKNITVNLTPELAQVNEY

SEQ ID NO: 215 - protein, 450 aa, Homo sapiens
MEGSKTSNNSTMQVSFVCQRCSQPLKLDTSFKILDRVTIQELTAPLLTTAQAKPGETQEEETNSGEEPFIETPRQDGVSRRFIPPARMMSTESANSFTLIGEASDGGTMENLSRRLKVTGDLFDIMSGQTDVDHPLCEECTDTLLDQLDTQLNVTENECQNYKRCLEILEQMNEDDSEQLQMELKELALEEERLIQELEDVEKNRKIVAENLEKVQAEAERLDQEEAQYQREYSEFKRQQLELDDELKSVENQMRYAQTQLDKLKKTNVFNATFHIWHSGQFGTINNFRLGRLPSVPVEWNEINAAWGQTVLLLHALANKMGLKFQRYRLVPYGNHSYLESLTDKSKELPLYCSGGLRFFWDNKFDHAMVAFLDCVQQFKEEVEKGETRFCLPYRMDVEKGKIEDTGGSGGSYSIKTQFNSEEQWTKALKFMLTNLKWGLAWVSSQFYNK

SEQ ID NO: 216 - protein, 302 aa, Homo sapiens
MPGVARLPLLLGLLLLPRPGRPLDLADYTYDLAEEDDSEPLNYKDPCKAAAFLGDIALDEEDLRAFQVQQAVDLRRHTARKSSIKAAVPGNTSTPSCQSTNGQPQRGACGRWRGRSRSRRAATSRPERVWPDGVIPFVIGGNFTGSQRAVFRQAMRHWEKHTCVTFLERTDEDSYIVFTYRPCGCCSYVGRRGGGPQAISIGKNCDKFGIVVHELGHVVGFWHEHTRPDRDRHVSIVRENIQPGVLHSSLLLLSCGSRNGASFPCSLESSIHQALCWTGLFLRPSPFPRLPLAAPRTLRAGV

SEQ ID NO: 217 - protein, 171 aa, Homo sapiens
MHPFYTRAATMIGEIAAAVSFISKFLRTKGLTSERQLQTFSQSLQELLAEHYKHHWFPEKPCKGSGYRCIRINHKMDPLIGQAAQRIGLSSQELFRLLPSELTLWVDPYEVSYRIGEDGSICVLYEASPAGGSTQNSTNVQMVDSRISCKEELLLGRTSPSKNYNMMTVSG

SEQ ID NO: 218 - protein, 152 aa, Homo sapiens
MEDEEVAESWEEAADSGEIDRRLEKKLKITQKESRKSKSPPKVPIVIQDDSLPAGPPPQIRILKRPTSNGVVSSPNSTSRPTLPVKSLAQREAEYAEARKRILGSASPEEEQEKPILDRPTRISQPEDSRQPNNVIRQPLGPDGSQGFKQRR

SEQ ID NO: 219 - protein, 315 aa, Homo sapiens
MDLRQFLMCLSLCTAFALSKPTEKKDRVHHEPQLSDKVHNDAQSFDYDHDAFLGAEEAKTFDQLTPEESKERLGMIVDKIDADKDGFVTEGELKSWIKHAQKKYIYDNVENQWQEFDMNQDGLISWDEYRNVTYGTYLDDPDPDDGFNYKQMMVRDERRFKMADKDGDLIATKEEFTAFLHPEEYDYMKDIVVQETMEDIDKNADGFIDLEEYIGDMYSHDGNTDEPEWVKTEREQFVEFRDKNRDGKMDKEETKDWILPSDYDHAEAEARHLVYESDQNKDGKLTKEEIVDKYDLFVGSQATDFGEALVRHDEF

SEQ ID NO: 220 - protein, 703 aa, Homo sapiens
MADRRRQRASQDTEDEESGASGSDSGGSPLRGGGSCSGSAGGGGSGSLPSQRGGRTGALHLRRVESGGAKSAEESECESEDGIEGDAVLSDYESAEDSEGEEGEYSEEENSKVELKSEANDAVNSSTKEEKGEEKPDTKSTVTGERQSGDGQESTEPVENKVGKKGPKHLDDDEDRKNPAYIPRKGLFFEHDLRGQTQEEEVRPKGRQRKLWKDEGRWEHDKFREDEQAPKSRQELIALYGYDIRSAHNPDDIKPRRIRKPRYGSPPQRDPNWNGERLNKSHRHQGLGGTLPPRTFINRNAAGTGRMSAPRNYSRSGGFKEGRAGFRPVEAGGQHGGRSGETVKHEISYRSRRLEQTSVRDPSPEADAPVLGSPEKEEAASEPPAAAPDAAPPPPDRPIEKKSYSRARRTRTKVGDAVKLAEEVPPPPEGLIPAPPVPETTPTPPTKTGTWEAPVDSSTSGLEQDVAQLNIAEQNWSPGQPSFLQPRELRGMPNHIHMGAGPPPQFNRMEEMGVQGGRAKRYSSQRQRPVPEPPAPPVHISIMEGHYYDPLQFQGPIYTHGDSPAPLPPQGMLVQPGMNLPHPGLHPHQTPAPLPNPGLYPPPVSMSPGQPPPQQLLAPTYFSAPGVMNFGNPSYPYAPGALPPPPPPHLYPNTQAPSQVYGGVTYYNPAQQQVQPKPSPPRRTPQPVTIKPPPPEVVSRGSS

SEQ ID NO: 221 - protein, 404 aa, Homo sapiens
MADKVLKEKRKLFIRSMGEGTINGLLDELLQTRVLNKEEMEKVKRENATVMDKTRALIDSVIPKGAQACQICITYICEEDSYLAGTLGLSADQTSGNYLNMQDSQGVLSSFPAPQAVQDNPAMPTSSGSEGNVKLCSLEEAQRIWKQKSAEIYPIMDKSSRTRLALIICNEEFDSIPRRTGAEVDITGMTMLLQNLGYSVDVKKNLTASDMTTELEAFAHRPEHKTSDSTFLVFMSHGIREGICGKKHSEQVPDILQLNAIFNMLNTKNCPSLKDKPKVIIIQACRGDSPGVVWFKDSVGVSGNLSLPTTEEFEDDAIKKAHIEKDFIAFCSSTPDNVSWRHPTMGSVFIGRLIEHMQEYACSCDVEEIFRKVRFSFEQPDGRAQMPTTERVTLTRCFYLFPGH

SEQ ID NO: 222 - protein, 243 aa, Homo sapiens
MAAIAASEVLVDSAEEGSLAAAAELAAQKREQRLRKFRELHLMRNEARKLNHQEVVEEDKRLKLPANWEAKKARLEWELKEEEKKKECAARGEDYEKVKLLEISAEDAERWERKKKRKNPDLGFSDYAAAQLRQYHRLTKQIKPDMETYERLREKHGEEFFPTSNSLLHGTHVPSTEEIDRMVIDLEKQIEKRDKYSRRRPYNDDADIDYINERNAKFNKKAERFYGKYTAEIKQNLERGTAV

SEQ ID NO: 223 - protein, 197 aa, Homo sapiens
MSRLSRSLLWAATCLGVLCVLSADKNTTQHPNVTTLAPISNVTSAPVTSLPLVTTPAPETCEGRNSCVSCFNVSVVNTTCFWIECKDESYCSHNSTVSDCQVGNTTDFCSVSTATPVPTANSTAKPTVQPSPSTTSKTVTTSGTTNNTVTPTSQPVRKSTFDAASFIGGIVLVLGVQAVIFFLYKFCKSKERNYHTL

SEQ ID NO: 224 - protein, 185 aa, Homo sapiens
MARGAALALLLFGLLGVLVAAPDGGFDLSDALPDNENKKPTAIPKKPSAGDDFDLGDAVVDGENDDPRPPNPPKPMPNPNPNHPSSSGSFSDADLADGVSGGEGKGGSDGGGSHRKEGEEADAPGVIPGIVGAVVVAVAGAISSFIAYQKKKLCFKENAEQGEVDMESHRNANAEPAVQRTLLEK

SEQ ID NO: 225 - protein, 1711 aa, Homo sapiens
MSAKVRLKKLEQLLLDGPWRNESALSVETLLDVLVCLYTECSHSALRRDKYVAEFLEWAKPFTQLVKEMQLHREDFEIIKVIGRGAFGEVAVVKMKNTERIYAMKILNKWEMLKRAETACFREERDVLVNGDCQWITALHYAFQDENHLYLVMDYYVGGDLLTLLSKFEDKLPEDMARFYIGEMVLAIDSIHQLHYVHRDIKPDNVLLDVNGHIRLADFGSCLKMNDDGTVQSSVAVGTPDYISPEILQAMEDGMGKYGPECDWWSLGVCMYEMLYGETPFYAESLVETYGKIMNHEERFQFPSHVTDVSEEAKDLIQRLICSRERRLGQNGIEDFKKHAFFEGLNWENIRNLEAPYIPDVSSPSDTSNFDVDDDVLRNTEILPPGSHTGFSGLHLPFIGFTFTTESCFSDRGSLKSIMQSNTLTKDEDVQRDLEHSLQMEAYERRIRRLEQEKLELSRKLQESTQTVQSLHGSSRALSNSNRDKEIKKLNEEIERLKNKIADSNRLERQLEDTVALRQEREDSTQRLRGLEKQHRVVRQEKEELHKQLVEASERLKSQAKELKDAHQQRKLALQEFSELNERMAELRAQKQKVSRQLRDKEEEMEVATQKVDAMRQEMRRAEKLRKELEAQLDDAVAEASKERKLREHSENFCKQMESELEALKVKQGGRGAGATLEHQQEISKIKSELEKKVLFYEEELVRREASHVLEVKNVKKEVHDSESHQLALQKEILMLKDKLEKSKRERHNEMEEAVGTIKDKYERERAMLFDENKKLTAENEKLCSFVDKLTAQNRQLEDELQDLAAKKESVAHWEAQIAEIIQWVSDEKDARGYLQALASKMTEELEALRSSSLGSRTLDPLWKVRRSQKLDMSARLELQSALEAEIRAKQLVQEELRKVKDANLTLESKLKDSEAKNRELLEEMEILKKKMEEKFRADTGLKLPDFQDSIFEYFNTAPLAHDLTFRTSSASEQETQAPKPEASPSMSVAASEQQEDMARPPQRPSAVPLPTTQALALAGPKPKAHQFSIKSFSSPTQCSHCTSLMVGLIRQGYACEVCSFACHVSCKDGAPQVCPIPPEQSKRPLGVDVQRGIGTAYKGHVKVPKPTGVKKGWQRAYAVVCDCKLFLYDLPEGKSTQPGVIASQVLDLRDDEFSVSSVLASDVIHATRRDIPCIFRVTASLLGAPSKTSSLLILTENENEKRKWVGILEGLQSILHKNRLRNQVVHVPLEAYDSSLPLIKAILTAAIVDADRIAVGLEEGLYVIEVTRDVIVRAADCKKVHQIELAPREKIVILLCGRNHHVHLYPWSSLDGAEGSFDIKLPETKGCQLMATATLKRNSGTCLFVAVKRLILCYEIQRTKPFHRKFNEIVAPGSVQCLAVLRDRLCVGYPSGFCLLSIQGDGQPLNLVNPNDPSLAFLSQQSFDALCAVELESEEYLLCFSHMGLYVDPQGRRARAQELMWPAAPVACSCSPTHVTVYSEYGVDVFDVRTMEWVQTIGLRRIRPLNSEGTLNLLNCEPPRLIYFKSKFSGAVLNVPDTSDNSKKQMLRTRSKRRFVFKVPEEERLQQRREMLRDPELRSKMISNPTNFNHVAHMGPGDGMQVLMDLPLSAVPPSQEERPGPAPTNLARQPPSRNKPYISWPSSGGSEPSVTVPLRSMSDPDQDFDKEPDSDSTKHSTPSNSSNPSGPPSPNSPHRSQLPLEGLEQPACDT

SEQ ID NO: 226 - protein, 2923 aa, Homo sapiens
MRSPATGVPLPTPPPPLLLLLLLLLPPPLLGDQVGPCRSLGSRGRGSSGACAPMGWLCPSSASNLWLYTSRCRDAGTELTGHLVPHHDGLRVWCPESEAHIPLPPAPEGCPWSCRLLGIGGHLSPQGKLTLPEEHPCLKAPRLRCQSCKLAQAPGLRAGERSPEESLGGRRKRNVNTAPQFQPPSYQATVPENQPAGTPVASLRAIDPDEGEAGRLEYTMDALFDSRSNQFFSLDPVTGAVTTAEELDRETKSTHVFRVTAQDHGMPRRSALATLTILVTDTNDHDPVFEQQEYKESLRENLEVGYEVLTVRATDGDAPPNANILYRLLEGSGGSPSEVFEIDPRSGVIRTRGPVDREEVESYQLTVEASDQGRDPGPRSTTAAVFLSVEDDNDNAPQFSEKRYVVQVREDVTPGAPVLRVTASDRDKGSNAVVHYSIMSGNARGQFYLDAQTGALDVVSPLDYETTKEYTLRVRAQDGGRPPLSNVSGLVTVQVLDINDNAPIFVSTPFQATVLESVPLGYLVLHVQAIDADAGDNARLEYRLAGVGHDFPFTINNGTGWISVAAELDREEVDFYSFGVEARDHGTPALTASASVSVTVLDVNDNNPTFTQPEYTVRLNEDAAVGTSVVTVSAVDRDAHSVITYQITSGNTRNRFSITSQSGGGLVSLALPLDYKLERQYVLAVTASDGTRQDTAQIVVNVTDANTHRPVFQSSHYTVNVNEDRPAGTTVVLISATDEDTGENARITYFMEDSIPQFRIDADTGAVTTQAELDYEDQVSYTLAITARDNGIPQKSDTTYLEILVNDVNDNAPQFLRDSYQGSVYEDVPPFTSVLQISATDRDSGLNGRVFYTFQGGDDGDGDFIVESTSGIVRTLRRLDRENVAQYVLRAYAVDKGMPPARTPMEVTVTVLDVNDNPPVFEQDEFDVFVEENSPIGLAVARVTATDPDEGTNAQIMYQIVEGNIPEVFQLDIFSGELTALVDLDYEDRPEYVLVIQATSAPLVSRATVHVRLLDRNDNPPVLGNFEILFNNYVTNRSSSFPGGAIGRVPAHDPDISDSLTYSFERGNELSLVLLNASTGELKLSRALDNNRPLEAIMSVLVSDGVHSVTAQCALRVTIITDEMLTHSITLRLEDMSPERFLSPLLGLFIQAVAATLATPPDHVVVFNVQRDTDAPGGHILNVSLSVGQPPGPGGGPPFLPSEDLQERLYLNRSLLTAISAQRVLPFDDNICLREPCENYMRCVSVLRFDSSAPFIASSSVLFRPIHPVGGLRCRCPPGFTGDYCETEVDLCYSRPCGPHGRCRSREGGYTCLCRDGYTGEHCEVSARSGRCTPGVCKNGGTCVNLLVGGFKCDCPSGDFEKPYCQVTTRSFPAHSFITFRGLRQRFHFTLALSFATKERDGLLLYNGRFNEKHDFVALEVIQEQVQLTFSAGESTTTVSPFVPGGVSDGQWHTVQLKYYNKPLLGQTGLPQGPSEQKVAVVTVDGCDTGVALRFGSVLGNYSCAAQGTQGGSKKSLDLTGPLLLGGVPDLPESFPVRMRQFVGCMRNLQVDSRHIDMADFIANNGTVPGCPAKKNVCDSNTCHNGGTCVNQWDAFSCECPLGFGGKSCAQEMANPQHFLGSSLVAWHGLSLPISQPWYLSLMFRTRQADGVLLQAITRGRSTITLQLREGHVMLSVEGTGLQASSLRLEPGRANDGDWHHAQLALGASGGPGHAILSFDYGQQRAEGNLGPRLHGLHLSNITVGGIPGPAGGVARGFRGCLQGVRVSDTPEGVNSLDPSHGESINVEQGCSLPDPCDSNPCPANSYCSNDWDSYSCSCDPGYYGDNCTNVCDLNPCEHQSVCTRKPSAPHGYTCECPPNYLGPYCETRIDQPCPRGWWGHPTCGPCNCDVSKGFDPDCNKTSGECHCKENHYRPPGSPTCLLCDCYPTGSLSRVCDPEDGQCPCKPGVIGRQCDRCDNPFAEVTTNGCEVNYDSCPRAIEAGIWWPRTRFGLPAAAPCPKGSFGTAVRHCDEHRGWLPPNLFNCTSITFSELKGFAERLQRNESGLDSGRSQQLALLLRNATQHTAGYFGSDVKVAYQLATRLLAHESTQRGFGLSATQDVHFTENLLRVGSALLDTANKRHWELIQQTEGGTAWLLQHYEAYASALAQNMRHTYLSPFTIVTPNIVISVVRLDKGNFAGAKLPRYEALRGEQPPDLETTVILPESVFRETPPVVRPAGPGEAQEPEELARRQRRHPELSQGEAVASVIIYRTLAGLLPHNYDPDKRSLRVPKRPIINTPVVSISVHDDEELLPRALDKPVTVQFRLLETEERTKPICVFWNHSILVSGTGGWSARGCEVVFRNESHVSCQCNHMTSFAVLMDVSRRENGEILPLKTLTYVALGVTLAALLLTFFFLTLLRILRSNQHGIRRNLTAALGLAQLVFLLGINQADLPFACTVIAILLHFLYLCTFSWALLEALHLYRALTEVRDVNTGPMRFYYMLGWGVPAFITGLAVGLDPEGYGNPDFCWLSIYDTLIWSFAGPVAFAVSMSVFLYILAARASCAAQRQGFEKKGPVSGLQPSFAVLLLLSATWLLALLSVNSDTLLFHYLFATCNCIQGPFIFLSYVVLSKEVRKALKLACSRKPSPDPALTTKSTLTSSYNCPSPYADGRLYQPYGDSAGSLHSTSRSGKSQPSYIPFLLREESALNPGQGPPGLGDPGSLFLEGQDQQHDPDTDSDSDLSLEDDQSGSYASTHSSDSEEEEEEEEEEAAFPGEQGWDSLLGPGAERLPLHSTPKDGGPGPGKAPWPGDFGTTAKESSGNGAPEERLRENGDALSREGSLGPLPGSSAQPHKGILKKKCLPTISEKSSLLRLPLEQCTGSSRGSSASEGSRGGPPPRPPPRQSLQEQLNGVMPIAMSIKAGTVDEDSSGSEFLFFNFLH

SEQ ID NO: 227 - protein, 238 aa, Homo sapiens
MADPDPRYPRSSIEDDFNYGSSVASATVHIRMAFLRKVYSILSLQVLLTTVTSTVFLYFESVRTFVHESPALILLFALGSLGLIFALILNRHKYPLNLYLLFGFTLLEALTVAVVVTFYDVYIILQAFILTTTVFFGLTVYTLQSKKDFSKFGAGLFALLWILCLSGFLKFFFYSEIMELVLAAAGALLFCGFIIYDTHSLMHKLSPEEYVLAAISLYLDIINLFLHLLRFLEAVNKK

SEQ ID NO: 228 - protein, 312 aa, Homo sapiens
MADFGISAGQFVAVVWDKSSPVEALKGLVDKLQALTGNEGRVSVENIKQLLQSAHKESSFDIILSGLVPGSTTLHSAEILAEIARILRPGGCLFLKEPVETAVDNNSKVKTASKLCSALTLSGLVEVKELQREPLTPEEVQSVREHLGHESDNLLFVQITGKKPNFEVGSSRQLKLSITKKSSPSVKPAVDPAAAKLWTLSANDMEDDSMDLIDSDELLDPEDLKKPDPASLRAASCGEGKKRKACKNCTCGLAEELEKEKSREQMSSQPKSACGNCYLGDAFRCASCPYLGMPAFKPGEKVLLSDSNLHDA

SEQ ID NO: 229 - protein, 1712 aa, Homo sapiens
MGRDQRAVAGPALRRWLLLGTVTVGFLAQSVLAGVKKFDVPCGGRDCSGGCQCYPEKGGRGQPGPVGPQGYNGPPGLQGFPGLQGRKGDKGERGAPGVTGPKGDVGARGVSGFPGADGIPGHPGQGGPRGRPGYDGCNGTQGDSGPQGPPGSEGFTGPPGPQGPKGQKGEPYALPKEERDRYRGEPGEPGLVGFQGPPGRPGHVGQMGPVGAPGRPGPPGPPGPKGQQGNRGLGFYGVKGEKGDVGQPGPNGIPSDTLHPIIAPTGVTFHPDQYKGEKGSEGEPGIRGISLKGEEGIMGFPGLRGYPGLSGEKGSPGQKGSRGLDGYQGPDGPRGPKGEAGDPGPPGLPAYSPHPSLAKGARGDPGFPGAQGEPGSQGEPGDPGLPGPPGLSIGDGDQRRGLPGEMGPKGFIGDPGIPALYGGPPGPDGKRGPPGPPGLPGPPGPDGFLFGLKGAKGRAGFPGLPGSPGARGPKGWKGDAGECRCTEGDEAIKGLPGLPGPKGFAGINGEPGRKGDRGDPGQHGLPGFPGLKGVPGNIGAPGPKGAKGDSRTITTKGERGQPGVPGVPGMKGDDGSPGRDGLDGFPGLPGPPGDGIKGPPGDPGYPGIPGTKGTPGEMGPPGLGLPGLKGQRGFPGDAGLPGPPGFLGPPGPAGTPGQIDCDTDVKRAVGGDRQEAIQPGCIGGPKGLPGLPGPPGPTGAKGLRGIPGFAGADGGPGPRGLPGDAGREGFPGPPGFIGPRGSKGAVGLPGPDGSPGPIGLPGPDGPPGERGLPGEVLGAQPGPRGDAGVPGQPGLKGLPGDRGPPGFRGDQGMPGMPGLKGQPGLPGPSGQPGLYGPPGLHGFPGAPGQEGPLGLPGIPGREGLPGDRGDPGDTGAPGPVGMKGLSGDRGDAGFTGEQGHPGSPGFKGIDGMPGTPGLKGDRGSPGMDGFQGMPGLKGRPGFPGSKGEAGFFGIPGLKGLAGEPGFKGIRGDPGPPGPPPVILPGMKDIKGEKGDEGPMGLKGYLGAKGIQGMPGIPGLSGIPGLPGRPGHIKGVKGDIGVPGIPGLPGFPGVAGPPGITGFPGFIGSRGDKGAPGRAGLYGEIGATGDFGDIGDTINLPGRPGLKGERGTTGIPGLKGFFGEKGTEGDIGFPGITGVTGVQGPPGLKGQTGFPGLTGPPGSQGELGRIGLPGGKGDDGWPGAPGLPGFPGLRGIRGLHGLPGTKGFPGSPGSDIHGDPGFPGPPGERGDPGEANTLPGPVGVPGQKGDQGAPGERGPPGSPGLQGFPGITPPSNISGAPGDKGAPGIFGLKGYRGPPGPPGSAALPGSKGDTGNPGAPGTPGTKGWAGDSGPQGRPGVFGLPGEKGPRGEQGFMGNTGPTGAVGDRGPKGPKGDPGFPGAPGTVGAPGIAGIPQKIAVQPGTVGPQGRRGPPGAPGEMGPQGPPGEPGFRGAPGKAGPQGRGGVSAVPGFRGDEGPIGHQGPIGQEGAPGRPGSPGLPGMPGRSVSIGYLLVKHSQTDQEPMCPVGMNKLWSGYSLLYFEGQEKAHNQDLGLAGSCLARFSTMPFLYCNPGDVCYYASRNDKSYWLSTTAPLPMMPVAEDEIKPYISRCSVCEAPAIAIAVHSQDVSIPHCPAGWRSLWIGYSFLMHTAAGDEGGGQSLVSPGSCLEDFRATPFIECNGGRGTCHYYANKYSFWLTTIPEQSFQGSPSADTLKAGLIRTHISRCQVCMKNL

SEQ ID NO: 230 - protein, 953 aa, Homo sapiens
MTAAENVCYTLINVPMDSEPPSEISLKNDLEKGDVKSKTEALKKVIIMILNGEKLPGLLMTIIRFVLPLQDHTIKKLLLVFWEIVPKTTPDGRLLHEMILVCDAYRKDLQHPNEFIRGSTLRFLCKLKEAELLEPLMPAIRACLEHRHSYVRRNAVLAIYTIYRNFEHLIPDAPELIHDFLVNEKDASCKRNAFMMLIHADQDRALDYLSTCIDQVQTFGDILQLVIVELIYKVCHANPSERARFIRCIYNLLQSSSPAVKYEAAGTLVTLSSAPTAIKAAAQCYIDLIIKESDNNVKLIVLDRLIELKEHPAHERVLQDLVMDILRVLSTPDLEVRKKTLQLALDLVSSRNVEELVIVLKKEVIKTNNVSEHEDTDKYRQLLVRTLHSCSVRFPDMAANVIPVLMEFLSDNNEAAAADVLEFVREAIQRFDNLRMLIVEKMLEVFHAIKSVKIYRGALWILGEYCSTKEDIQSVMTEIRRSLGEIPIVESEIKKEAGELKPEEEITVGPVQKLVTEMGTYATQSALSSSRPTKKEEDRPPLRGFLLDGDFFVAASLATTLTKIALRYVALVQEKKKQNSFVAEAMLLMATILHLGKSSLPKKPITDDDVDRISLCLKVLSECSPLMNDIFNKECRQSLSHMLSAKLEEEKLSQKKESEKRNVTVQPDDPISFMQLTAKNEMNCKEDQFQLSLLAAMGNTQRKEAADPLASKLNKVTQLTGFSDPVYAEAYVHVNQYDIVLDVLVVNQTSDTLQNCTLELATLGDLKLVEKPSPLTLAPHDFANIKANVKVASTENGIIFGNIVYDVSGAASDRNCVVLSDIHIDIMDYIQPATCTDAEFRQMWAEFEWENKVTVNTNMVDLNDYLQHILKSTNMKCLTPEKALSGYCGFMAANLYARSIFGEDALANVSIEKPIHQGPDAAVTGHIRIRAKSQGMALSLGDKINLSQKKTSI

SEQ ID NO: 231 - protein, 658 aa, Homo sapiens
MVPRLLLRAWPRGPAVGPGAPSRPLSAGSGPGQYLQRSIVPTMHYQDSLPRLPIPKLEDTIRRYLSAQKPLLNDGQFRKTEQFCKSFENGIGKELHEQLVALDKQNKHTSYISGPWFDMYLSARDSVVLNFNPFMAFNPDPKSEYNDQLTRATNMTVSAIRFLKTLRAGLLEPEVFHLNPAKSDTITFKRLIRFVPSSLSWYGAYLVNAYPLDMSQYFRLFNSTRLPKPSRDELFTDDKARHLLVLRKGNFYIFDVLDQDGNIVSPSEIQAHLKYILSDSSPAPEFPLAYLTSENRDIWAELRQKLMSSGNEESLRKVDSAVFCLCLDDFPIKDLVHLSHNMLHGDGTNRWFDKSFNLIIAKDGSTAVHFEHSWGDGVAVLRFFNEVFKDSTQTPAVTPQSQPATTDSTVTVQKLNFELTDALKTGITAAKEKFDATMKTLTIDCVQFQRGGKEFLKKQKLSPDAVAQLAFQMAFLRQYGQTVATYESCSTAAFKHGRTETIRPASVYTKRCSEAFVREPSRHSAGELQQMMVECSKYHGQLTKEAAMGQGFDRHLFALRHLAAAKGIILPELYLDPAYGQINHNVLSTSTLSSPAVNLGGFAPVVSDGFGVGYAVHDNWIGCNVSSYPGRNAREFLQCVEKALEDMFDALEGKSIKS

SEQ ID NO: 232 - protein, 1036 aa, Homo sapiens
MYLVAGDRGLAGCGHLLVSLLGLLLLLARSGTRALVCLPCDESKCEEPRNCPGSIVQGVCGCCYTCASQRNESCGGTFGIYGTCDRGLRCVIRPPLNGDSLTEYEAGVCEDENWTDDQLLGFKPCNENLIAGCNIINGKCECNTIRTCSNPFEFPSQDMCLSALKRIEEEKPDCSKARCEVQFSPRCPEDSVLIEGYAPPGECCPLPSRCVCNPAGCLRKVCQPGNLNILVSKASGKPGECCDLYECKPVFGVDCRTVECPPVQQTACPPDSYETQVRLTADGCCTLPTRCECLSGLCGFPVCEVGSTPRIVSRGDGTPGKCCDVFECVNDTKPACVFNNVEYYDGDMFRMDNCRFCRCQGGVAICFTAQCGEINCERYYVPEGECCPVCEDPVYPFNNPAGCYANGLILAHGDRWREDDCTFCQCVNGERHCVATVCGQTCTNPVKVPGECCPVCEEPTIITVDPPACGELSNCTLTGKDCINGFKRDHNGCRTCQCINTEELCSERKQGCTLNCPFGFLTDAQNCEICECRPRPKKCRPIICDKYCPLGLLKNKHGCDICRCKKCPELSCSKICPLGFQQDSHGCLICKCREASASAGPPILSGTCLTVDGHHHKNEESWHDGCRECYCLNGREMCALITCPVPACGNPTIHPGQCCPSCADDFVVQKPELSTPSICHAPGGEYFVEGETWNIDSCTQCTCHSGRVLCETEVCPPLLCQNPSRTQDSCCPQCTDQPFRPSLSRNNSVPNYCKNDEGDIFLAAESWKPDVCTSCICIDSVISCFSESCPSVSCERPVLRKGQCCPYCIEDTIPKKVVCHFSGKAYADEERWDLDSCTHCYCLQGQTLCSTVSCPPLPCVEPINVEGSCCPMCPEMYVPEPTNIPIEKTNHRGEVDLEVPLWPTPSENDIVHLPRDMGHLQVDYRDNRLHPSEDSSLDSIASVVVPIIICLSIIIAFLFINQKKQWIPLLCWYRTPTKPSSLNNQLVSVDCKKGTRVQVDSSQRMLRIAEPDARFSGFYSMQKQNHLQADNFYQTV

SEQ ID NO: 233 - protein, 297 aa, Homo sapiens
MLFASGGFQVKLYDIEQQQIRNALENIRKEMKLLEQAGSLKGSLSVEEQLSLISGCPNIQEAVEGAMHIQECVPEDLELKKKIFAQLDSIIDDRVILSSSTSCLMPSKLFAGLVHVKQCIVAHPVNPPYYIPLVELVPHPETAPTTVDRTHALMKKIGQCPMRVQKEVAGFVLNRLQYAIISEAWRLVEEGIVSPSDLDLVMSEGLGMRYAFIGPLETMHLNAEGMLSYCDRYSEGIKHVLQTFGPIPEFSRATAEKVNQDMCMKVPDDPEHLAARRQWRDECLMRLAKLKSQVQPQ

SEQ ID NO: 234 - protein, 508 aa, Homo sapiens
MRCPKSAVTMRNEELLLSNGTANKMNGALDHSDQPDPDAIKMFVGQIPRSWSEKELKELFEPYGAVYQINVLRDRSQNPPQSKGCCFVTFYTRKAALEAQNALHNIKTLPGMHHPIQMKPADSEKSNAVEDRKLFIGMVSKKCNENDIRVMFSPFGQIEECRILRGPDGLSRGCAFVTFSTRAMAQNAIKAMHQSQTMEGCSSPIVVKFADTQKDKEQRRLQQQLAQQMQQLNTATWGNLTGLGGLTPQYLALLQQATSSSNLGAFSGIQQMAGMNALQLQNLATLAAAAAAAQTSATSTNANPLSTTSSALGALTSPVAASTPNSTAGAAMNSLTSLGTLQGLAGATVGLNNINALAGMAALNGGLGATGLTNGTAGTMDALTQAYSGIQQYAAAALPTLYSQSLLQQQSAAGSQKEGPEGANLFIYHLPQEFGDQDILQMFMPFGNVISAKVFIDKQTNLSKCFGFVSYDNPVSAQAAIQAMNGFQIGMKRLKVQLKRSKNDSKPY

SEQ ID NO: 235 - protein, 774 aa, Homo sapiens
MDDWKSRLVIKSMLPHFAMVGNRQEPRKLQESGKKPSWMEEEDLSFLYKSSPGRKHQGTVKRRQEEDHFQFPDMADGGYPNKIKRPCLEDVTLAMGPGAHPSTACAELQVPPLTINPSPAAMGVAGQSLLLENNPMNGNIMGSPFVVPQTTEVGLKGPTVPYYEKINSVPAVDQELQELLEELTKIQDPSPNELDLEKILGTKPEEPLVLDHPQATLSTTPKPSVQMSHLESLASSKEFASSCSQVTGMSLQIPSSSTGISYSIPSTSKQIVSPSSSMAQSKSQVQAMLPVALPPLPVPQWHHAHQLKALAASKQGSATKQQGPTPSWSGLPPPGLSPPYRPVPSPHPPPLPLPPPPPPFSPQSLMVSCMSSNTLSGSTLRGSPNALLSSMTSSSNAALGPAMPYAPEKLPSPALTQQPQFGPQSSILANLMSSTIKTPQGHLMSALPASNPGPSPPYRPEKLSSPGLPQQSFTPQCSLIRSLTPTSNLLSQQQQQQQQQQQANVIFKPISSNSSKTLSMIMQQGMASSSPGATEPFTFGNTKPLSHFVSEPGPQKMPSMPTTSRQPSLLHYLQQPTPTQASSATASSTATATLQLQQQQQQQQQQPDHSSFLLQQMMQQPQRFQRSVASDSMPALPRQGCCHLFAWTSAASSVKPQHQHGNSFTSRQDPQPGDVSPSNITHVDKACKLGEARHPQVSLGRQPPSCQALGSESFLPGSSFAHELARVTSSYSTSEAAPWGSWDPKAWRQVPAPLLPSCDATARGTEIRSYGNDP

SEQ ID NO: 236 - protein, 286 aa, Homo sapiens
MAMEGYWRFLALLGSALLVGFLSVIFALVWVLHYREGLGWDGSALEFNWHPVLMVTGFVFIQGIAIIVYRLPWTWKCSKLLMKSIHAGLNAVAAILAIISVVAVFENHNVNNIANMYSLHSWVGLIAVICYLLQLLSGFSVFLLPWAPLSLRAFLMPIHVYSGIVIFGTVIATALMGLTEKLIFSLRDPAYSTFPPEGVFVNTLGLLILVFGALIFWIVTRPQWKRPKEPNSTILHPNGGTEQGARGSMPAYSGNNMDKSDSELNSEVAARKRNLALDEAGQRSTM

SEQ ID NO: 237 - protein, 393 aa, Homo sapiens
MKRTRDEVDATLQIAKLNAAELLPAVHCLGFGPGASGAAAGDFCLLELEPTLCQQLEDGHSLVIRGDKDEQAVLCSKDKTYDLKIADTSNMLLFIPGCKTPDQLKKEDSHCNIIHTEIFGFSNNYWELRRRRPKLKKLKKLLMENPYEGPDSQKEKDSNSSKYTTEDLLDQIQASEEEIMTQLQVLNACKIGGYWRILEFDYEMKLLNHVTQLVDSESWSFGKVPLNTCLQELGPLEPEEMIEHCLKCYGKKYVDEGEVYFELDADKICRAAARMLLQNAVKFNLAEFQEVWQQSVPEGMVTSLDQLKGLALVDRHSRPEIIFLLKVDDLPEDNQERFNSLFSLREKWTEEDIAPYIQDLCGEKQTIGALLTKYSHSSMQNGVKVYNSRRPIS

SEQ ID NO: 238 - protein, 190 aa, Homo sapiens
MAEKTQKSVKIAPGAVVCVESEIRGDVTIGPRTVIHPKARIIAEAGPIVIGEGNLIEEQALIINAYPDNITPDTEDPEPKPMIIGTNNVFEVGCYSQAMKMGDNNVIESKAYVGRNVILTSGCIIGACCNLNTFEVIPENTVIYGADCLRRVQTERPQPQTLQLDFLMKILPNYHHLKKTMKGSSTPVKN

SEQ ID NO: 239 - protein, 773 aa, Homo sapiens
METDESPSPLPCGPAGEAVMESRARPFQALPREQSPPPPLQTSSGAEVMDVGSGGDGQSELPAEDPFNFYGASLLSKGSFSKGRLLIDPNCSGHSPRTARHAPAVRKFSPDLKLLKDVKISVSFTESCRSKDRKVLYTGAERDVRAECGLLLSPVSGDVHACPFGGSVGDGVGIGGESADKKDEENELDQEKRVEYAVLDELEDFTDNLELDEEGAGGFTAKAIVQRDRVDEEALNFPYEDDFDNDVDALLEEGLCAPKKRRTEEKYGGDSDHPSDGETSVQPMMTKIKTVLKSRGRPPTEPLPDGWIMTFHNSGVPVYLHRESRVVTWSRPYFLGTGSIRKHDPPLSSIPCLHYKKMKDNEEREQSSDLTPSGDVSPVKPLSRSAELEFPLDEPDSMGADPGPPDEKDPLGAEAAPGALGQVKAKVEVCKDESVDLEEFRSYLEKRFDFEQVTVKKFRTWAERRQFNREMKRKQAESERPILPANQKLITLSVQDAPTKKEFVINPNGKSEVCILHEYMQRVLKVRPVYNFFECENPSEPFGASVTIDGVTYGSGTASSKKLAKNKAARATLEILIPDFVKQTSEEKPKDSEELEYFNHISIEDSRVYELTSKAGLLSPYQILHECLKRNHGMGDTSIKFEVVPGKNQKSEYVMACGKHTVRGWCKNKRVGKQLASQKILQLLHPHVKNWGSLLRMYGRESSKMVKQETSDKSVIELQQYAKKNKPNLHILSKLQEEMKRLAEEREETRKKPKMSIVASAQPGGEPLCTVDV

SEQ ID NO: 240 - protein, 492 aa, Homo sapiens
MAPVGVEKKLLLGPNGPAVAAAGDLTSEEEEGQSLWSSILSEVSTRARSKLPSGKNILVFGEDGSGKTTLMTKLQGAEHGKKGRGLEYLYLSVHDEDRDDHTRCNVWILDGDLYHKGLLKFAVSAESLPETLVIFVADMSRPWTVMESLQKWASVLREHIDKMKIPPEKMRELERKFVKDFQDYMEPEEGCQGSPQRRGPLTSGSDEENVALPLGDNVLTHNLGIPVLVVCTKCDAVSVLEKEHDYRDEHLDFIQSHLRRFCLQYGAALIYTSVKEEKNLDLLYKYIVHKTYGFHFTTPALVVEKDAVFIPAGWDNEKKIAILHENFTTVKPEDAYEDFIVKPPVRKLVHDKELAAEDEQVFLMKQQSLLAKQPATPTRASESPARGPSGSPRTQGRGGPASVPSSSPGTSVKKPDPNIKNNAASEGVLASFFNSLLSKKTGSPGSPGAGGVQSTAKKSGQKTVLSNVQEELDRMTRKPDSMVTNSSTENEA

SEQ ID NO: 241 - protein, 716 aa, Homo sapiens
MGETKIIYHLDGQETPYLVKLPLPAERVTLADFKGVLQRPSYKFFFKSMDDDFGVVKEEISDDNAKLPCFNGRVVSWLVSAEGSHPDPAPFCADNPSELPPPMERTGGIGDSRPPSFHPHAGGGSQENLDNDTETDSLVSAQRERPRRRDGPEHATRLNGTAKGERRREPGGYDSSSTLMSSELETTSFFDSDEDDSTSRFSSSTEQSSASRLMRRHKRRRRKQKVSRIERSSSFSSITDSTMSLNIITVTLNMEKYNFLGISIVGQSNERGDGGIYIGSIMKGGAVAADGRIEPGDMLLQVNEINFENMSNDDAVRVLREIVHKPGPITLTVAKCWDPSPRGCFTLPRSEPIRPIDPAAWVSHTAAMTGTFPAYGMSPSLSTITSTSSSITSSIPDTERLDDFHLSIHSDMAAIVKAMASPESGLEVRDRMWLKITIPNAFIGSDVVDWLYHNVEGFTDRREARKYASNLLKAGFIRHTVNKITFSEQCYYIFGDLCGNMANLSLHDHDGSSGASDQDTLAPLPHPGAAPWPMAFPYQYPPPPHPYNPHPGFPELGYSYGGGSASSQHSEGSRSSGSNRSGSDRRKEKDPKAGDSKSGGSGSESDHTTRSSLRGPRERAPSERSGPAASEHSHRSHHSLASSLRSHHTHPSYGPPGVPPLYGPPMLMMPPPPAAMGPPGAPPGRDLASVPPELTASRQSFRMAMGNPSEFFVDVM

SEQ ID NO: 242 - protein, 528 aa, Homo sapiens
MNDHLHVGSHAHGQIQVQQLFEDNSNKRTVLTTQPNGLTTVGKTGLPVVPERQLDSIHRRQGSSTSLKSMEGMGKVKATPMTPEQAMKQYMQKLTAFEHHEIFSYPEIYFLGLNAKKRQGMTGGPNNGGYDDDQGSYVQVPHDHVAYRYEVLKVIGKGSFGQVVKAYDHKVHQHVALKMVRNEKRFHRQAAEEIRILEHLRKQDKDNTMNVIHMLENFTFRNHICMTFELLSMNLYELIKKNKFQGFSLPLVRKFAHSILQCLDALHKNRIIHCDLKPENILLKQQGRSGIKVIDFGSSCYEHQRVYTYIQSRFYRAPEVILGARYGMPIDMWSLGCILAELLTGYPLLPGEDEGDQLACMIELLGMPSQKLLDASKRAKNFVSSKGYPRYCTVTTLSDGSVVLNGGRSRRGKLRGPPESREWGNALKGCDDPLFLDFLKQCLEWDPAVRMTPGQALRHPWLRRRLPKPPTGEKTSVKRITESTGAITSISKLPPPSSSASKLRTNLAQMTDANGNIQQRTVLPKLVS

SEQ ID NO: 243 - protein, 2118 aa, Homo sapiens
MLRVFILYAENVHTPDTDISDAYCSAVFAGVKKRTKVIKNSVNPVWNEGFEWDLKGIPLDQGSELHVVVKDHETMGRNRFLGEAKVPLREVLATPSLSASFNAPLLDTKKQPTGASLVLQVSYTPLPGAVPLFPPPTPLEPSPTLPDLDVVAGGGQSRAETWSLLSDSTMDTRYSGKKWPAPTDTGGEEDTEDQGLTGDEAEPFLDQSGGPGAPTTPRKLPSRPPPHYPGIKRKRSAPTSRKLLSDKPQDFQIRVQVIEGRQLPGVNIKPVVKVTAAGQTKRTRIHKGNSPLFNETLFFNLFDSPGELFDEPIFITVVDSRSLRTDALLGEFRMDVGTIYREPRHAYLRKWLLLSDPDDFSAGARGYLKTSLCVLGPGDEAPLERKDPSEDKEDIESNLLRPTGVALRGAHFCLKVFRAEDLPQMDDAVMDNVKQIFGFESNKKNLVDPFVEVSFAGKMLCSKILEKTANPQWNQNITLPAMFPSMCEKMRIRIIDWDRLTHNDIVATTYLSMSKISAPGGEIEVDDYLGFLPTFGPCYINLYGSPREFTGFPDPYTELNTGKGEGVAYRGRLLLSLETKLVEHSEQKVEDLPADDILRVEKYLRRRKYSLFAAFYSATMLQDVDDAIQFEVSIGNYGNKFDMTCLPLASTTQYSRAVFDGCHYYYLPWGNVKPVVVLSSYWEDISHRIETQNQLLGIADRLEAGLEQVHLALKAQCSTEDVDSLVAQLTDELIAGCSQPLGDIHETPSATHLDQYLYQLRTHHLSQITEAALALKLGHSELPAALEQAEDWLLRLRALAEEPQNSLPDIVIWMLQGDKRVAYQRVPAHQVLFSRRGANYCGKNCGKLQTIFLKYPMEKVPGARMPVQIRVKLWFGLSVDEKEFNQFAEGKLSVFAETYENETKLALVGNWGTTGLTYPKFSDVTGKIKLPKDSFRPSAGWTWAGDWFVCPEKTLLHDMDAGHLSFVEEVFENQTRLPGGQWIYMSDNYTDVNGEKVLPKDDIECPLGWKWEDEEWSTDLNRAVDEQGWEYSITIPPERKPKHWVPAEKMYYTHRRRRWVRLRRRDLSQMEALKRHRQAEAEGEGWEYASLFGWKFHLEYRKTDAFRRRRWRRRMEPLEKTGPAAVFALEGALGGVMDDKSEDSMSVSTLSFGVNRPTISCIFDYGNRYHLRCYMYQARDLAAMDKDSFSDPYAIVSFLHQSQKTVVVKNTLNPTWDQTLIFYEIEIFGEPATVAEQPPSIVVELYDHDTYGADEFMGRCICQPSLERMPRLAWFPLTRGSQPSGELLASFELIQREKPAIHHIPGFEVQETSRILDESEDTDLPYPPPQREANIYMVPQNIKPALQRTAIEILAWGLRNMKSYQLANISSPSLVVECGGQTVQSCVIRNLRKNPNFDICTLFMEVMLPREELYCPPITVKVIDNRQFGRRPVVGQCTIRSLESFLCDPYSAESPSPQGGPDDVSLLSPGEDVLIDIDDKEPLIPIQLADGLSSLAPTNTASPPSSPHEEEFIDWWSKFFASIGEREKCGSYLEKDFDTLKVYDTQLENVEAFEGLSDFCNTFKLYRGKTQEETEDPSVIGEFKGLFKIYPLPEDPAIPMPPRQFHQLAAQGPQECLVRIYIVRAFGLQPKDPNGKCDPYIKISIGKKSVSDQDNYIPCTLEPVFGKMFELTCTLPLEKDLKITLYDYDLLSKDEKIGETVVDLENRLLSKFGARCGLPQTYCVSGPNQWRDQLRPSQLLHLFCQQHRVKAPVYRTDRVMFQDKEYSIEEIEAGRIPNPHLGPVEERLALHVLQQQGLVPEHVESRPLYSPLQPDIEQGKLQMWVDLFPKALGRPGPPFNITPRRARRFFLRCIIWNTRDVILDDLSLTGEKMSDIYVKGWMIGFEEHKQKTDVHYRSLGGEGNFNWRFIFPFDYLPAEQVCTIAKKDAFWRLDKTESKIPARVVFQIWDNDKFSFDDFLGSLQLDLNRMPKPAKTAKKCSLDQLDDAFHPEWFVSLFEQKTVKGWWPCVAEEGEKKILAGKLEMTLEIVAESEHEERPAGQGRDEPNMNPKLEDPRRPDTSFLWFTSPYKTMKFILWRRFRWAIILFIILFILLLFLAIFIYAFPNYAAMKLVKPFS

SEQ ID NO: 244 - protein, 333 aa, Homo sapiens
MSGDEMIFDPTMSKKKKKKKKPFMLDEEGDTQTEETQPSETKEVEPEPTEDKDLEADEEDTRKKDASDDLDDLNFFNQKKKKKKTKKIFDIDEAEEGVKDLKIESDVQEPTEPEDDLDIMLGNKKKKKKNVKFPDEDEILEKDEALEDEDNKKDDGISFSNQTGPAWAGSERDYTYEELLNRVFNIMREKNPDMVAGEKRKFVMKPPQVVRVGTKKTSFVNFTDICKLLHRQPKHLLAFLLAELGTSGSIDGNNQLVIKGRFQQKQIENVLRRYIKEYVTCHTCRSPDTILQKDTRLYFLQCETCHSRCSVASIKTGFQAVTGKRAQLRAKAN

SEQ ID NO: 245 - protein, 362 aa, Homo sapiens
MSGGSADYNREHGGPEGMDPDGVIESNWNEIVDNFDDMNLKESLLRGIYAYGFEKPSAIQQRAIIPCIKGYDVIAQAQSGTGKTATFAISILQQLEIEFKETQALVLAPTRELAQQIQKVILALGDYMGATCHACIGGTNVRNEMQKLQAEAPHIVVGTPGRVFDMLNRRYLSPKWIKMFVLDEADEMLSRGFKDQIYEIFQKLNTSIQVVLLSATMPTDVLEVTKKFMRDPIRILVKKEELTLEGIKQFYINVEREEWKLDTLCDLYETLTITQAVIFLNTRRKVDWLTEKMHARDFTVSALHGDMDQKERDVIMREFRSGSSRVLITTDLLARGIDVQQVSLVINYDLPTNRENYIHRSR

SEQ ID NO: 246 - protein, 733 aa, Homo sapiens
LPGDQECEEEAVCVIMCASVKYNIRGPALIPRMKTKHRIYYITLFSIVLLGLIATGMFQFWPHSIESSNDWNVEKRSIRDVPVVRLPADSPIPERGDLSCRMHTCFDVYRCGFNPKNKIKVYIYALKKYVDDFGVSVSNTISREYNELLMAISDSDYYTDDINRACLFVPSIDVLNQNTLRIKETAQAMAQLSRWDRGTNHLLFNMLPGGPPDYNTALDVPRDRALLAGGGFSTWTYRQGYDVSIPVYSPLSAEVDLPEKGPGPRQYFLLSSQVGLHPEYREDLEALQVKHGESVLVLDKCTNLSEGVLSVRKRCHKHQVFDYPQVLQEATFCVVLRGARLGQAVLSDVLQAGCVPVVIADSYILPFSEVLDWKRASVVVPEEKMSDVYSILQSIPQRQIEEMQRQARWFWEAYFQSIKAIALATLQIINDRIYPYAAISYEEWNDPPAVKWGSVSNPLFLPLIPPQSQGFTAIVLTYDRVESLFRVITEVSKVPSLSKLLVVWNNQNKNPPEDSLWPKIRVPLKVVRTAENKLSNRFFPYDEIETEAVLAIDDDIIMLTSDELQFGYEVWREFPDRLVGYPGRLHLWDHEMNKWKYESEWTNEVSMVLTGAAFYHKYFNYLYTYKMPGDIKNWVDAHMNCEDIAMNFLVANVTGKAVIKVTPRKKFKCPECTAIDGLSLDQTHMVERSECINKFASVFGTMPLKVVEHRADPVLYKDDFPEKLKSFPNIGSL

SEQ ID NO: 247 - protein, 4981 aa, Homo sapiens
MDLAPDRATGRPWLPLHTLSVSQLLRVFWLLSLLPGQAWVHGAEPRQVFQVLEEQPPGTLVGTIQTRPGFTYRLSESHALFAINSSTGALYTTSTIDRESLPSDVINLVVLSSAPTYPTEVRVLVRDLNDNAPVFPDPSIVVTFKEDSSSGRQVILDTATDSDIGSNGVDHRSYRIIRGNEAGRFRLDITLNPSGEGAFLHLVSKGGLDREVTPQYQLLVEVEDKGEPKRRGYLQVNVTVQDINDNPPVFGSSHYQAGVPEDAVVGSSVLQVAAADADEGTNADIRYRLQDEGTPFQMDPETGLITVREPLDFEARRQYSLTVQAMDRGVPSLTGRAEALIQLLDVNDNDPVVKFRYFPATSRYASVDENAQVGTVVALLTVTDADSPAANGNISVQILGGNEQRHFEVQSSKVPNLSLIKVASALDRERIPSYNLTVSVSDNYGAPPGAAVQARSSVASLVIFVNDINDHPPVFSQQVYRVNLSEEAPPGSYVSGISATDGDSGLNANLRYSIVSGNGLGWFHISEHSGLVTTGSSGGLDRELASQIVLNISARDQGVHPKVSYAQLVVTLLDVNDEKPVFSQPEGYDVSVVENAPTGTELLMLRATDGDLGDNGTVRFSLQEAETDRRSFRLDPVSGRLSTISSLDREEQAFYSLLVLATDLGSPPQSSMARINVSLLDINDNSPVFYPVQYFAHIKENEPGGSYITTVSATDPDLGTNGTVKYSISAGDRSRFQVNAQSGVISTRMALDREEKTAYQLQIVATDGGNLQSPNQAIVTITVLDTQDNPPVFSQVAYSFVVFENVALGYHVGSVSASTMDLNSNISYLITTGDQKGMFAINQVTGQLTTANVIDREEQSFYQLKVVASGGTVTGDTMVNITVKDLNDNSPHFLQAIESVNVVENWQAGHSIFQAKAVDPDEGVNGMVLYSLKQNPKNLFAINEKNGTISLLGPLDVHAGSYQIEILASDMGVPQLSSSVILTVYVHDVNDNSPVFDQLSYEVTLSESEPVNSRFFKVQASDKDSGANGEIAYTIAEGNTGDAFGIFPDGQLYIKSELDRELQDRYVLMVVASDRAVEPLSATVNVTVILEDVNDNRPLFNSTNYTFYFEEEQRAGSFVGKVSAVDKDFGPNGEVRYSFEMVQPDFELHAISGEITNTHQFDRESLMRRRGTAVFSFTVIATDQGIPQPLKDQATVHVYMKDINDNAPKFLKDFYQATISESAANLTQVLRVSASDVDEGNNGLIHYSIIKGNEERQFAIDSTSGQVTLIGKLDYEATPAYSLVIQAVDSGTIPLNSTCTLNIDILDENDNTPSFPKSTLFVDVLENMRIGELVSSVTATDSDSGDNADLYYSITGTNNHGTFSISPNTGSIFLAKKLDFETQSLYKLNITAKDQGRPPRSSTMSVVIHVRDFNDNPPSFPPGDIFKSIVENIPIGTSVISVTAHDPDADINGQLSYTIIQQMPRGNHFTIDEVKGTIYTNAEIDREFANLFELTVKANDQAVPIETRRYALKNVTILVTDLNDNVPMFISQNALAADPSAVIGSVLTTIMAADPDEGANGEIEYEIINGDTDTFIVDRYSGDLRVASALVPSQLIYNLIVSATDLGPERRKSTTELTIILQGLDGPVFTQPKYITILKEGEPIGTNVISIEAASPRGSEAPVEYYIVSVRCEEKTVGRLFTIGRHTGIIQTAAILDREQGACLYLVDVYAIEKSTAFPRTQRAEVEITLQDINDNPPVFPTDMLDLTVEENIGDGSKIMQLTAMDADEGANALVTYTIISGADDSFRIDPESGDLIATRRLDRERRSKYSLLVRADDGLQSSDMRINITVSDVNDHTPKFSRPVYSFDIPEDTIPGSLVAAILATDDDSGVNGEITYIVNEDDEDGIFFLNPITGVFNLTRLLDYEVQQYYILTVRAEDGGGQFTTIRVYFNILDVNDNPPIFSLNSYSTSLMENLPVGSTVLVFNVTDADDGINSQLTYSIASGDSLGQFTVDKNGVLKVLKALDRESQSFYNLVVQVHDLPQIPASRFTSTAQVSIILLDVNDNPPTFLSPKLTYIPENTPIDTVVFKAQATDPDSGPNSYIEYTLLNPLGNKFSIGTIDGEVRLTGELDREEVSNYTLTVVATDKGQPSLSSSTEVVVMVLDINDNNPIFAQALYKVEINENTLTGTDIIQVFAADGDEGTNGQVRYGIVNGNTNQEFRIDSVTGAITVAKPLDREKTPTYHLTVQATDRGSTPRTDTSTVSIVLLDINDFVPVFELSPYSVNVPENLGTLPRTILQVVARDDDRGSNSKLSYVLFGGNEDNAFTLSASGELGVTQSLDRETKERFVLMITATDSGSPALTGTGTINVIVDDVNDNVPTFASKAYFTTIPEDAPTGTDVLLVNASDADASKNAVIRIIGGNSQFTINPSTGQIITSALLDRETKDNYTLVVVCSDAGSPEPLSSSTSVLVTVTDVNDNPPRFQHHPYVTHIPSPTLPGSFVFAVTVTDADIGPNSELHYSLSGRNSEKFHIDPLRGAIMAAGPLNGASEVTFSVHVKDGGSFPKTDSTTVTVRFVNKADFPKVRAKEQTFMFPENQPVSSLVTTITGSSLRGEPMSYYIASGNLGNTFQIDQLTGQVSISQPLDFEKIQKYVVWIEARDGGFPPFSSYEKLDITVLDVNDNAPIFKEDPFISEILENLSPRKILTVSAMDKDSGPNGQLDYEIVNGNMENSFSINHATGEIRSVRPLDREKVSHYVLTIKSSDKGSPSQSTSVKVMINILDENDNAPRFSQIFSAHVPENSPLGYTVTRVTTSDEDIGINAISRYSIMDASLPFTINPSTGDIVISRPLNREDTDRYRIRVSAHDSGWTVSTDVTIFVTDINDNAPRFSRTSYYLDCPELTEIGSKVTQVFATDPDEGSNGQVFYFIKSQSEYFRINATTGEIFNKQILKYQNVTGFSNVNINRHSFIVTSSDRGKPSLISETTVTINIVDSNDNAPQFLKSKYFTPVTKNVKVGTKLIRVTAIDDKDFGLNSEVEYFISNDNHLGKFKLDNDTGWISVASSLISDLNQNFFITVTAKDKGNPPLSSQATVHITVTEENYHTPEFSQSHMSATIPESHSIGSIVRTVSARDRDAAMNGLIKYSISSGNEEGIFAINSSTGILTLAKALDYELCQKHEMTISAIDGGWVARTGYCSVTVNVIDVNDNSPVFLSDDYFPTVLENAPSGTTVIHLNATDADSGTNAVIAYTVQSSDSDLFVIDPNTGVITTQGFLDFETKQSYHLTVKAFNVPDEERCSFATVNIQLKGTNEYVPRFVSKLYYFEISEAAPKGTIVGEVFASDRDLGTDGEVHYLIFGNSRKKGFQINKKTGQIYVSGILDREKEERVSLKVLAKNFGSIRGADIDEVTVNVTVLDANDPPIFTLNIYSVQISEGVPIGTHVTFVSAFDSDSIPSWSRFSYFIGSGNENGAFSINPQTGQITVTAELDRETLPIYNLSVLAVDSGTPSATGSASLLVTLEDINDNGPMLTVSEGEVMENKRPGTLVMTLQSTDPDLPPNQGPFTYYLLSTGPATSYFSLSTAGVLSTTREIDREQIADFYLSVVTKDSGVPQMSSTGTVHITVIDQNDNPSQSRTVEIFVNYYGNLFPGGILGSVKPQDPDVLDSFHCSLTSGVTSLFSIPGGTCDLNSQPRSTDGTFDLTVLSNDGVHSTVTSNIRVFFAGFSNATVDNSILLRLGVPTVKDFLTNHYLHFLRIASSQLTGLGTAVQLYSAYEENNRTFLLAAVKRNHNQYVNPSGVATFFESIKEILLRQSGVKVESVDHDSCVHGPCQNGGSCLRRLAVSSVLKSRESLPVIIVANEPLQPFLCKCLPGYAGSWCEIDIDECLPSPCHSGGTCHNLVGGFSCSCPDGFTGRACERDINECLQSPCKNGAICQNFPGSFNCVCKTGYTGKMCESSVNYCECNPCFNGGSCQSGVDSYYCHCPFGVFGKHCELNSYGFEELSYMEFPSLDPNNNYIYVKFATIKSHALLLYNYDNQTGDRAEFLALEIAEERLRFSYNLGSGTYKLTTMKKVSDGHFHTVIARRAGMAASLTVDSCSENQEPGYCTVSNVAVSDDWTLDVQPNRVTVGGIRSLEPILQRRGHVESHDFVGCIMEFAVNGRPLEPSQALAAQGILDQCPRLEGACTRSPCQHGGTCMDYWSWQQCHCKEGLTGKYCEKSVTPDTALSLEGKGRLDYHMSQNEKREYLLRQSLRGAMLEPFGVNSLEVKFRTRSENGVLIHIQESSNYTTVKIKNGKVYFTSDAGIAGKVERNIPEVYVADGHWHTFLIGKNGTATVLSVDRIYNRDIIHPTQDFGGLDVLTISLGGIPPNQAHRDAQTAGFDGCIASMWYGGESLPFSGKHSLASISKTDPSVKIGCRGPNICASNPCWGDLLCINQWYAYRCVPPGDCASHPCQNGGSCEPGLHSGFTCSCPDSHTGRTCEMVVACLGVLCPQGKVCKAGSPAGHVCVLSQGPEEISLPLWAVPAIVGSCATVLALLVLSLILCNQCRGKKAKNPKEEKKPKEKKKKGSENVAFDDPDNIPPYGDDMTVRKQPEGNPKPDIIERENPYLIYDETDIPHNSETIPSAPLASPEQEIEHYDIDNASSIAPSDADIIQHYKQFRSHTPKFSIQRHSPLGFARQSPMPLGASSLTYQPSYGQGLRTSSLSHSACPTPNPLSRHSPAPFSKSSTFYRNSPARELHLPIRDGNTLEMHGDTCQPGIFNYATRLGRRSKSPQAMASHGSRPGSRLKQPIGQIPLESSPPVGLSIEEVERLNTPRPRNPSICSADHGRSSSEEDCRRPLSRTRNPADGIPAPESSSDSDSHESFTCSEMEYDREKPMVYTSRMPKLSQVNESDADDEDNYGARLKPRRYHGRRAEGGPVGTQAAAPGTADNTLPMKLGQQAGTFNWDNLLNWGPGFGHYVDVFKDLASLPEKAAANEEGKAGTTKPVPKDGEAEQYV

SEQ ID NO: 248 - protein, 514 aa, Homo sapiens
MGRPESAGGGSRGPFEGGGRARRAGGIFLTLSILRTRDLPSGAMSEGVDLIDIYADEEFNQDPEFNNTDQIDLYDDVLTATSQPSDDRSSSTEPPPPVRQEPSPKPNNKTPAILYTYSGLRNRRAAVYVGSFSWWTTDQQLIQVIRSIGVYDVVELKFAENRANGQSKGYAEVVVASENSVHKLLELLPGKVLNGEKVDVRPATRQNLSQFEAQARKRECVRVPRGGIPPRAHSRDSSDSADGRATPSENLVPSSARVDKPPSVLPYFNRPPSALPLMGLPPPPIPPPPPLSSSFGVPPPPPGIHYQHLMPPPPRLPPHLAVPPPGAIPPALHLNPAFFPPPNATVGPPPDTYMKASAPYNHHGSRDSGPPPSTVSEAEFEDIMKRNRAISSSAISKAVSGASAGDYSDAIETLLTAIAVIKQSRVANDERCRVLISSLKDCLHGIEAKSYSVGASGSSSRKRHRSRERSPSRSRESSRRHRDLLHNEDRHDDYFQERNREHERHRDRERDRHH

SEQ ID NO: 249 - protein, 605 aa, Homo sapiens
MEADIITNLRCRLKEAEEERLKAAQYGLQLVESQNELQNQLDKCRNEMMTMTESYEQEKYTLQREVELKSRMLESLSCECEAIKQQQKMHLEKLEEQLSRSHGQEVNELKTKIEKLKVELDEARLSEKQLKHQVDHQKELLSCKSEELRVMSERVQESMSSEMLALQIELTEMESMKTTLKEEVNELQYRQEQLELLITNLMRQVDRLKEEKEEREKEAVSYYNALEKARVANQDLQVQLDQALQQALDPNSKGNSLFAEVEDRRAAMERQLISMKVKYQSLKKQNVFNREQMQRMKLQIATLLQMKGSQTEFEQQERLLAMLEQKNGEIKHLLGEIRNLEKFKNLYDSMESKPSVDSGTLEDNTYYTDLLQMKLDNLNKEIESTKGELSIQRMKALFESQRALDIERKLFANERCLQLSESENMKLRAKLDELKLKYEPEETVEVPVLKKRREVLPVDITTAKDACVNNSALGGEVYRLPPQKEETQSCPNSLEDNNLQLEKSVSIYTPVVSLSPHKNLPVDMQLKKEKKCVKLIGVPADAEALSERSGNTPNSPRLAAESKLQTEVKEGKETSSKLEKETCKKLHPILYVSSKSTPETQCPQQ

SEQ ID NO: 250 - protein, 1198 aa, Homo sapiens
MAEHPPLLDTTQILSSDISLLSAPIVSADGTQQVILVQVNPGEAFTIRREDGQFQCITGPAQVPMMSPNGSVPPIYVPPGYAPQVIEDNGVRRVVVVPQAPEFHPGSHTVLHRSPHPPLPGFIPVPTMMPPPPRHMYSPVTGAGDMTTQYMPQYQSSQVYGDVDAHSTHGRSNFRDERSSKTYERLQKKLKDRQGTQKDKMSSPPSSPQKCPSPINEHNGLIKGQIAGGINTGSAKIKSGKGKGGTQVDTEIEEKDEETKAFEALLSNIVKPVASDIQARTVVLTWSPPSSLINGETDESSVPELYGYEVLISSTGKDGKYKSVYVGEETNITLNDLKPAMDYHAKVQAEYNSIKGTPSEAEIFTTLSCEPDIPNPPRIANRTKNSLTLQWKAPSDNGSKIQNFVLEWDEGKGNGEFCQCYMGSQKQFKITKLSPAMGCKFRLSARNDYGTSGFSEEVLYYTSGCAPSMPASPVLTKAGITWLSLQWSKPSGTPSDEGISYILEMEEETSGYGFKPKYDGEDLAYTVKNLRRSTKYKFKVIAYNSEGKSNPSEVVEFTTCPDKPGIPVKPSVKGKIHSHSFKITWDPPKDNGGATINKYVVEMAEGSNGNKWEMIYSGATREHLCDRLNPGCFYRLRVYCISDGGQSAVSESLLVQTPAVPPGPCLPPRLQGRPKAKEIQLRWGPPLVDGGSPISCYSVEMSPIEKDEPREVYQGSEVECTVSSLLPGKTYSFRLRAANKMGFGPFSEKCDITTAPGPPDQCKPPQVTCRSATCAQVNWEVPLSNGTDVTEYRLEWGGVEGSMQICYCGPGLSYEIKGLSPATTYYCRVQALSVVGAGPFSEVVACVTPPSVPGIVTCLQEISDDEIENPHYSPSTCLAISWEKPCDHGSEILAYSIDFGDKQSLTVGKVTSYIINNLQPDTTYRIRIQALNSLGAGPFSHMIKLKTKPLPPDPPRLECVAFSHQNLKLKWGEGTPKTLSTDSIQYHLQMEDKNGRFVSLYRGPCHTYKVQRLNESTSYKFCIQACNEAGEGPLSQEYIFTTPKSVPAALKAPKIEKVNDHICEITWECLQPMKGDPVIYSLQVMLGKDSEFKQIYKGPDSSFRYSSLQLNCEYRFRVCAIRQCQDSLGHQDLVGPYSTTVLFISQRTEPPASTNRDTVESTRTRRALSDEQCAAVILVLFAFFSILIAFIIQYFVIK

SEQ ID NO: 251 - protein, 394 aa, Homo sapiens
MRSSSGTPSAPTARRDSCLASCWPIATKSLALLPRLECSGTILAHCKFCLPGSSDSPASTPLVAGITGYGCAGVSSVAYGLLARELERVDSGYRSAMSVQSSLVMHPIYAYGSEEQRQKYLPQLAKGELLGCFGLTEPNSGSDPSSMETRAHYNSSNKSYTLNGTKTWITNSPMADLFVVWARCEDGCIRGFLLEKGMRGLSAPRIQGKFSLRASATGMIIMDGVEVPEENVLPGASSLGGPFGCLNNARYGIAWGVLGASEFCLHTARQYALDRMQFGVPLARNQLIQKKLADMLTEITLGLHACLQLGRLKDQDKAAPEMVSLLKRNNCGKALDIARQARDMLGGNGISDEYHVIRHAMNLEAVNTYEGTHDIHALILGRAITGIQAFTASK

SEQ ID NO: 252 - protein, 308 aa, Homo sapiens
MPGQELRTVNGSQMLLVLLVLSWLPHGGALSLAEASRASFPGPSELHSEDSRFRELRKRYEDLLTRLRANQSWEDSNTDLVPAPAVRILTPEVRLGSGGHLHLRISRAALPEGLPEASRLHRALFRLSPTASRSWDVTRPLRRQLSLARPQAPALHLRLSPPPSQSDQLLAESSSARPQLELHLRPQAARGRRRARARNGDHCPLGPGRCCRLHTVRASLEDLGWADWVLSPREVQVTMCIGACPSQFRAANMHAQIKTSLHRLKPDTVPAPCCVPASYNPMVLIQKTDTGVSLQTYDDLLAKDCHCI

SEQ ID NO: 253 - protein, 106 aa, Homo sapiens
MAQEFVNCKIQPGKVVVFIKPTCPYCRRAQEILSQLPIKQGLLEFVDITATNHTNEIQDYLQQLTGARTVPRVFIGKDCIGGCSDLVSLQQSGELLTRLKQIGALQ

SEQ ID NO: 254 - protein, 138 aa, Homo sapiens
MISLTDTQKIGMGLTGFGVFFLFFGMILFFDKALLAIGNVLFVAGLAFVIGLERTFRFFFQKHKMKATGFFLGGVFVVLIGWPLIGMIFEIYGFFLLFRGFFPVVVGFIRRVPVLGSLLNLPGIRSFVDKVGESNNMV

SEQ ID NO: 255 - protein, 4374 aa, Homo sapiens
MKVDRTKLKKTPTEAPADCRALIDKLKVCNDEQLLLELQQIKTWNIGKCELYHWVDLLDRFDGILADAGQTVENMSWMLVCDRPEREQLKMLLLAVLNFTALLIEYSFSRHLYSSIEHLTTLLASSDMQVVLAVLNLLYVFSKRSNYITRLGSDKRTPLLTRLQHLAESWGGKENGFGLAECCRDLHMMKYPPSATTLHFEFYADPGAEVKIEKRTTSNTLHYIHIEQLDKISESPSEIMESLTKMYSIPKDKQMLLFTHIRLAHGFSNHRKRLQAVQARLHAISILVYSNALQESANSILYNGLIEELVDVLQITDKQLMEIKAASLRTLTSIVHLERTPKLSSIIDCTGTASYHGFLPVLVRNCIQAMIDPSMDPYPHQFATALFSFLYHLASYDAGGEALVSCGMMEALLKVIKFLGDEQDQITFVTRAVRVVDLITNLDMAAFQSHSGLSIFIYRLEHEVDLCRKECPFVIKPKIQRPNTTQEGEEMETDMDGVQCIPQRAALLKSMLNFLKKAIQDPAFSDGIRHVMDGSLPTSLKHIISNAEYYGPSLFLLATEVVTVFVFQEPSLLSSLQDNGLTDVMLHALLIKDVPATREVLGSLPNVFSALCLNARGLQSFVQCQPFERLFKVLLSPDYLPAMRRRRSSDPLGDTASNLGSAVDELMRHQPTLKTDATTAIIKLLEEICNLGRDPKYICQKPSIQKADGTATAPPPRSNHAAEEASSEDEEEEEVQAMQSFNSTQQNETEPNQQVVGTEERIPIPLMDYILNVMKFVESILSNNTTDDHCQEFVNQKGLLPLVTILGLPNLPIDFPTSAACQAVAGVCKSILTLSHEPKVLQEGLLQLDSILSSLEPLHRPIESPGGSVLLRELACAGNVADATLSAQATPLLHALTAAHAYIMMFVHTCRVGQSEIRSISVNQWGSQLGLSVLSKLSQLYCSLVWESTVLLSLCTPNSLPSGCEFGQADMQKLVPKDEKAGTTQGGKRSDGEQDGAAGSMDASTQGLLEGIGLDGDTLAPMETDEPTASDSKGKSKITPAMAARIKQIKPLLSASSRLGRALAELFGLLVKLCVGSPVRQRRSHHAASTTTAPTPAARSTASALTKLLTKGLSWQPPPYTPTPRFRLTFFICSVGFTSPMLFDERKYPYHLMLQKFLCSGGHNALFETFNWALSMGGKVPVSEGLEHSDLPDGTGEFLDAWLMLVEKMVNPTTVLESPHSLPAKLPGGVQNFPQFSALRFLVVTQKAAFTCIKNLWNRKPLKVYGGRMAESMLAILCHILRGEPVIRERLSKEKEGSRGEEDTGQEEGGSRREPQVNQQQLQQLMDMGFTREHAMEALLNTSTMEQATEYLLTHPPPIMGGVVRDLSMSEEDQMMRAIAMSLGQDIPMDQRAESPEEVACRKEEEERKAREKQEEEEAKCLEKFQDADPLEQDELHTFTDTMLPGCFHLLDELPDTVYRVCDLIMTAIKRNGADYRDMILKQVVNQVWEAADVLIKAALPLTTSDTKTVSEWISQMATLPQASNLATRILLLTLLFEELKLPCAWVVESSGILNVLIKLLEVVQPCLQAAKEQKEVQTPKWITPVLLLIDFYEKTAISSKRRAQMTKYLQSNSNNWRWFDDRSGRWCSYSASNNSTIDSAWKSGETSVRFTAGRRRYTVQFTTMVQVNEETGNRRPVMLTLLRVPRLNKNSKNSNGQELEKTLEESKEMDIKRKENKGNDTPLALESTNTEKETSLEETKIGEILIQGLTEDMVTVLIRACVSMLGVPVDPDTLHATLRLCLRLTRDHKYAMMFAELKSTRMILNLTQSSGFNGFTPLVTLLLRHIIEDPCTLRHTMEKVVRSAATSGAGSTTSGVVSGSLGSREINYILRVLGPAACRNPDIFTEVANCCIRIALPAPRGSGTASDDEFENLRIKGPNAVQLVKTTPLKPSPLPVIPDTIKEVIYDMLNALAAYHAPEEADKSDPKPGVMTQEVGQLLQDMGDDVYQQYRSLTRQSSDFDTQSGFSINSQVFAADGASTETSASGTSQGEASTPEESRDGKKDKEGDRASEEGKQKGKGSKPLMPTSTILRLLAELVRSYVGIATLIANYSYTVGQSELIKEDCSVLAFVLDHLLPHTQNAEDKDTPALARLFLASLAAAGSGTDAQVALVNEVKAALGRALAMAESTEKHARLQAVMCIISTIMESCPSTSSFYSSATAKTQHNGMNNIIRLFLKKGLVNDLARVPHSLDLSSPNMANTVNAALKPLETLSRIVNQPSSLFGSKSASSKNKSEQDAQGASQDSSSNQQDPGEPGEAEVQEEDHDVTQTEVADGDIMDGEAETDSVVIAGQPEVLSSQEMQVENELEDLIDELLERDGGSGNSTIIVSRSGEDESQEDVLMDEAPSNLSQASTLQANREDSMNILDPEDEEEHTQEEDSSGSNEDEDDSQDEEEEEEEDEEDDQEDDEGEEGDEDDDDDGSEMELDEDYPDMNASPLVRFERFDREDDLIIEFDNMFSSATDIPPSPGNIPTTHPLMVRHADHSSLTLGSGSSTTRLTQGIGRSQRTLRQLTANTGHTIHVHYPGNRQPNPPLILQRLLGPSAAADILQLSSSLPLQSRGRARLLVGNDDVHIIARSDDELLDDFFHDQSTATSQAGTLSSIPTALTRWTEECKVLDAESMHDCVSVVKVSIVNHLEFLRDEELEERREKRRKQLAEEETKITDKGKEDKENRDQSAQCTASKSNDSTEQNLSDGTPMPDSYPTTPSSTDAATSESKETLGTLQSSQQQPTLPTPPALGEVPQELQSPAGEGGSSTQLLMPVEPEELGPTRPSGEAETTQMELSPAPTITSLSPERAEDSDALTAVSSQLEGSPMDTSSLASCTLEEAVGDTSAAGSSEQPRAGSSTPGDAPPAVAEVQGRSDGSGESAQPPEDSSPPASSESSSTRDSAVAISGADSRGILEEPLPSTSSEEEDPLAGISLPEGVDPSFLAALPDDIRREVLQNQLGIRPPTRTAPSTNSSAPAVVGNPGVTEVSPEFLAALPPAIQEEVLAQQRAEQQRRELAQNASSDTPMDPVTFIQTLPSDLRRSVLEDMEDSVLAVMPPDIAAEAQALRREQEARQRQLMHERLFGHSSTSALSAILRSPAFTSRLSGNRGVQYTRLAVQRGGTFQMGGSSSHNRPSGSNVDTLLRLRGRLLLDHEALSCLLVLLFVDEPKLNTSRLHRVLRNLCYHAQTRHWVIRSLLSILQRSSESELCIETPKLTTSEEKGKKSSKSCGSSSHENRPLDLLHKMESKSSNQLSWLSVSMDAALGCRTNIFQIQRSGGRKHTEKHASGGSTVHIHPQAAPVVCRHVLDTLIQLAKVFPSHFTQQRTKETNCESDRERGNKACSPCSSQSSSSGICTDFWDLLVKLDNMNVSRKGKNSVKSVPVSAGGEGETSPYSLEASPLGQLMNMLSHPVIRRSSLLTEKLLRLLSLISIALPENKVSEAQANSGSGASSTTTATSTTSTTTTTAASTTPTPPTAPTPVTSAPALVAATAISTIVVAASTTVTTPTTATTTVSISPTTKGSKSPAKVSDGGSSSTDFKMVSSGLTENQLQLSVEVLTSHSCSEEGLEDAANVLLQLSRGDSGTRDTVLKLLLNGARHLGYTLCKQIGTLLAELREYNLEQQRRAQCETLSPDGLPEEQPQTTKLKGKMQSRFDMAENVVIVASQKRPLGGRELQLPSMSMLTSKTSTQKFFLRVLQVIIQLRDDTRRANKKAKQTGRLGSSGLGSASSIQAAVRQLEAEADAIIQMVREGQRARRQQQAATSESSQSEASVRREESPMDVDQPSPSAQDTQSIASDGTPQGEKEKEERPPELPLLSEQLSLDELWDMLGECLKELEESHDQHAVLVLQPAVEAFFLVHATERESKPPVRDTRESQLAHIKDEPPPLSPAPLTPATPSSLDPFFSREPSSMHISSSLPPDTQKFLRFAETHRTVLNQILRQSTTHLADGPFAVLVDYIRVLDFDVKRKYFRQELERLDEGLRKEDMAVHVRRDHVFEDSYRELHRKSPEEMKNRLYIVFEGEEGQDAGGLLREWYMIISREMFNPMYALFRTSPGDRVTYTINPSSHCNPNHLSYFKFVGRIVAKAVYDNRLLECYFTRSFYKHILGKSVRYTDMESEDYHFYQGLVYLLENDVSTLGYDLTFSTEVQEFGVCEVRDLKPNGANILVTEENKKEYVHLVCQMRMTGAIRKQLAAFLEGFYEIIPKRLISIFTEQELELLISGLPTIDIDDLKSNTEYHKYQSNSIQIQWFWRALRSFDQADRAKFLQFVTGTSKVPLQGFAALEGMNGIQKFQIHRDDRSTDRLPSAHTCFNQLDLPAYESFEKLRHMLLLAIQECSEGFGLA

SEQ ID NO: 256 - protein, 149 aa, Homo sapiens
MKVASGSTATAAAGPSCALKAGKTASGAGEVVRCLSEQSVAISRCAGGAGARLPALLDEQQVNVLLYDMNGCYSRLKELVPTLPQNRKVSKVEILQHVIDYIRDLQLELNSESEVGTPGGRGLPVRAPLSTLNGEISALTAEVRSRSDH

SEQ ID NO: 257 - protein, 366 aa, Homo sapiens
MAGPAWISKVSRLLGAFHNPKQVTRGFTGGVQTVTLIPGDGIGPEISAAVMKIFDAAKAPIQWEERNVTAIQGPGGKWMIPSEAKESMDKNKMGLKGPLKTPIAAGHPSMNLLLRKTFDLYANVRPCVSIEGYKTPYTDVNIVTIRENTEGEYSGIEHVIVDGVVQSIKLITEGASKRIAEFAFEYARNNHRSNVTAVHKANIMRMSDGLFLQKCREVAESCKDIKFNEMYLDTVCLNMVQDPSQFDVLVMPNLYGDILSDLCAGLIGGLGVTPSGNIGANGVAIFESVHGTAPDIAGKDMANPTALLLSAVMMLRHMGLFDHAARIEAACFATIKDGKSLTKDLGGNAKCSDFTEEICRRVKDLD

SEQ ID NO: 258 - protein, 489 aa, Homo sapiens
MALLFLLPLVMQGVSRAEMGTADLGPSSVPTPTNVTIESYNMNPIVYWEYQIMPQVPVFTVEVKNYGVKNSEWIDACINISHHYCNISDHVGDPSNSLWVRVKARVGQKESAYAKSEEFAVCRDGKIGPPKLDIRKEEKQIMIDIFHPSVFVNGDEQEVDYDPETTCYIRVYNVYVRMNGSEIQYKILTQKEDDCDEIQCQLAIPVSSLNSQYCVSAEGVLHVWGVTTEKSKEVCITIFNSSIKGSLWIPVVAALLLFLVLSLVFICFYIKKINPLKEKSIILPKSLISVVRSATLETKPESKYVSLITSYQPFSLEKEVVCEEPLSPATVPGMHTEDNPGKVEHTEELSSITEVVTTEENIPDVVPGSHLTPIERESSSPLSSNQSEPGSIALNSYHSRNCSESDHSRNGFDTDSSCLESHSSLSDSEFPPNNKGEIKTEGQELITVIKAPTSFGYDKPHVLVDLLVDDSGKESLIGYRPTEDSKEFS

SEQ ID NO: 259 - protein, 246 aa, Homo sapiens
MVVDFWTWEQTFQELIQEAKPRATWTLKLDGNLQLDCLAQGWKQYQQRAFGWFRCSSCQRSWASAQVQILCHTYWEHWTSQGQVRMRLFGQRCQKCSWSQYEMPEFSSDSTMRILSNLVQHILKKYYGNGTRKSPEMPVILEVSLEGSHDTANCEACTLGICGQGLKSCMTKPSKSLLPHLKTGNSSPGIGAVYLANQAKNQSAEAKEAKGSGYEKLGPSRDPDPLNICVFILLLVFIVVKCFTSE

SEQ ID NO: 260 - protein, 162 aa, Homo sapiens
MRISKPHLRSISIQCYLCLLLNSHFLTEAGIHVFILGCFSAGLPKTEANWVNVISDLKKIEDLIQSMHIDATLYTESDVHPSCKVTAMKCFLLELQVISLESGDASIHDTVENLIILANNSLSSNGNVTESGCKECEELEEKNIKEFLQSFVHIVQMFINTS

SEQ ID NO: 261 - protein, 599 aa, Homo sapiens
MMNKLYIGNLSPAVTADDLRQLFGDRKLPLAGQVLLKSGYAFVDYPDQNWAIRAIETLSGKVELHGKIMEVDYSVSKKLRSRKIQIRNIPPHLQWEVLDGLLAQYGTVENVEQVNTDTETAVVNVTYATREEAKIAMEKLSGHQFENYSFKISYIPDEEVSSPSPPQRAQRGDHSSREQGHAPGGTSQARQIDFPLRILVPTQFVGAIIGKEGLTIKNITKQTQSRVDIHRKENSGAAEKPVTIHATPEGTSEACRMILEIMQKEADETKLAEEIPLKILAHNGLVGRLIGKEGRNLKKIEHETGTKITISSLQDLSIYNPERTITVKGTVEACASAEIEIMKKLREAFENDMLAVNQQANLIPGLNLSALGIFSTGLSVLSPPAGPRGAPPAAPYHPFTTHSGYFSSLYPHHQFGPFPHHHSYPEQEIVNLFIPTQAVGAIIGKKGAHIKQLARFAGASIKIAPAEGPDVSERMVIITGPPEAQFKAQGRIFGKLKEENFFNPKEEVKLEAHIRVPSSTAGRVIGKGGKTVNELQNLTSAEVIVPRDQTPDENEEVIVRIIGHFFASQTAQRKIREIVQQVKQQEQKYPQGVASQRSK

SEQ ID NO: 262 - protein, 1049 aa, Homo sapiens
MGSRTPESPLHAVQLRWGPRRRPPLLPLLLLLLPPPPRVGGFNLDAEAPAVLSGPPGSFFGFSVEFYRPGTDGVSVLVGAPKANTSQPGVLQGGAVYLCPWGASPTQCTPIEFDSKGSRLLESSLSSSEGEEPVEYKSLQWFGATVRAHGSSILACAPLYSWRTEKEPLSDPVGTCYLSTDNFTRILEYAPCRSDFSWAAGQGYCQGGFSAEFTKTGRVVLGGPGSYFWQGQILSATQEQIAESYYPEYLINLVQGQLQTRQASSIYDDSYLGYSVAVGEFSGDDTEDFVAGVPKGNLTYGYVTILNGSDIRSLYNFSGEQMASYFGYAVAATDVNGDGLDDLLVGAPLLMDRTPDGRPQEVGRVYVYLQHPAGIEPTPTLTLTGHDEFGRFGSSLTPLGDLDQDGYNDVAIGAPFGGETQQGVVFVFPGGPGGLGSKPSQVLQPLWAASHTPDFFGSALRGGRDLDGNGYPDLIVGSFGVDKAVVYRGRPIVSASASLTIFPAMFNPEERSCSLEGNPVACINLSFCLNASGKHVADSIGFTVELQLDWQKQKGGVRRALFLASRQATLTQTLLIQNGAREDCREMKIYLRNESEFRDKLSPIHIALNFSLDPQAPVDSHGLRPALHYQSKSRIEDKAQILLDCGEDNICVPDLQLEVFGEQNHVYLGDKNALNLTFHAQNVGEGGAYEAELRVTAPPEAEYSGLVRHPGNFSSLSCDYFAVNQSRLLVCDLGNPMKAGASLWGGLRFTVPHLRDTKKTIQFDFQILSKNLNNSQSDVVSFRLSVEAQAQVTLNGVSKPEAVLFPVSDWHPRDQPQKEEDLGPAVHHVYELINQGPSSISQGVLELSCPQALEGQQLLYVTRVTGLNCTTNHPINPKGLELDPEGSLHHQQKREAPSRSSASSGPQILKCPEAECFRLRCELGPLHQQESQSLQLHFRVWAKTFLQREHQPFSLQCEAVYKALKMPYRILPRQLPQKERQVATAVQWTKAEGSYGVPLWIIILAILFGLLLLGLLIYILYKLGFFKRSLPYGTAMEKAQLKPPATSDA

SEQ ID NO: 263 - protein, 788 aa, Homo sapiens
MRARPRPRPLWATVLALGALAGVGVGGPNICTTRGVSSCQQCLAVSPMCAWCSDEALPLGSPRCDLKENLLKDNCAPESIEFPVSEARVLEDRPLSDKGSGDSSQVTQVSPQRIALRLRPDDSKNFSIQVRQVEDYPVDIYYLMDLSYSMKDDLWSIQNLGTKLATQMRKLTSNLRIGFGAFVDKPVSPYMYISPPEALENPCYDMKTTCLPMFGYKHVLTLTDQVTRFNEEVKKQSVSRNRDAPEGGFDAIMQATVCDEKIGWRNDASHLLVFTTDAKTHIALDGRLAGIVQPNDGQCHVGSDNHYSASTTMDYPSLGLMTEKLSQKNINLIFAVTENVVNLYQNYSELIPGTTVGVLSMDSSNVLQLIVDAYGKIRSKVELEVRDLPEELSLSFNATCLNNEVIPGLKSCMGLKIGDTVSFSIEAKVRGCPQEKEKSFTIKPVGFKDSLIVQVTFDCDCACQAQAEPNSHRCNNGNGTFECGVCRCGPGWLGSQCECSEEDYRPSQQDECSPREGQPVCSQRGECLCGQCVCHSSDFGKITGKYCECDDFSCVRYKGEMCSGHGQCSCGDCLCDSDWTGYYCNCTTRTDTCMSSNGLLCSGRGKCECGSCVCIQPGSYGDTCEKCPTCPDACTFKKECVECKKFDRGALHDENTCNRYCRDEIESVKELKDTGKDAVNCTYKNEDDCVVRFQYYEDSSGKSILYVVEEPECPKGPDILVVLLSVMGAILLIGLAALLIWKLLITIHDRKEFAKFEEERARAKWDTANNPLYKEATSTFTNITYRGT

SEQ ID NO: 264 - protein, 705 aa, Homo sapiens
MTKFGFLRLSYEKQDTLLKLLILSMAAVLSFSTRLFAVLRFESVIHEFDPYFNYRTTRFLAEEGFYKFHNWFDDRAWYPLGRIIGGTIYPGLMITSAAIYHVLHFFHITIDIRNVCVFLAPLFSSFTTIVTYHLTKELKDAGAGLLAAAMIAVVPGYISRSVAGSYDNEGIAIFCMLLTYYMWIKAVKTGSICWAAKCALAYFYMVSSWGGYVFLINLIPLHVLVLMLTGRFSHRIYVAYCTVYCLGTILSMQISFVGFQPVLSSEHMAAFGVFGLCQIHAFVDYLRSKLNPQQFEVLFRSVISLVGFVLLTVGALLMLTGKISPWTGRFYSLLDPSYAKNNIPIIASVSEHQPTTWSSYYFDLQLLVFMFPVGLYYCFSNLSDARIFIIMYGVTSMYFSAVMVRLMLVLAPVMCILSGIGVSQVLSTYMKNLDISRPDKKSKKQQDSTYPIKNEVASGMILVMAFFLITYTFHSTWVTSEAYSSPSIVLSARGGDGSRIIFDDFREAYYWLRHNTPEDAKVMSWWDYGYQITAMANRTILVDNNTWNNTHISRVGQAMASTEEKAYEIMRELDVSYVLVIFGGLTGYSSDDINKFLWMVRIGGSTDTGKHIKENDYYTPTGEFRVDREGSPVLLNCLMYKMCYYRFGQVYTEAKRPPGFDRVRNAEIGNKDFELDVLEEAYTTEHWLVRIYKVKDLDNRGLSRT

SEQ ID NO: 265 - protein, 266 aa, Homo sapiens
MVKVTFNSALAQKEAKKDEPKSGEEALIIPPDAVAVDCKDPDDVVPVGQRRAWCWCMCFGLAFMLAGVILGGAYLYKYFALQPDDVYYCGIKYIKDDVILNEPSADAPAALYQTIEENIKIFEEEEVEFISVPVPEFADSDPANIVHDFNKKLTAYLDLNLDKCYVIPLNTSIVMPPRNLLELLINIKAGTYLPQSYLIHEHMVITDRIENIDHLGFFIYRLCHDKETYKLQRRETIKGIQKREASNCFAIRHFENKFAVETLICS

SEQ ID NO: 266 - protein, 267 aa, Homo sapiens
MVKISFQPAVAGIKGDKADKASASAPAPASATEILLTPAREEQPPQHRSKRGGSVGGVCYLSMGMVVLLMGLVFASVYIYRYFFLAQLARDNFFRCGVLYEDSLSSQVRTQMELEEDVKIYLDENYERINVPVPQFGGGDPADIIHDFQRGLTAYHDISLDKCYVIELNTTIVLPPRNFWELLMNVKRGTYLPQTYIIQEEMVVTEHVSDKEALGSFIYHLCNGKDTYRLRRRATRRRINKRGAKNCNAIRHFENTFVVETLICGVV

SEQ ID NO: 267 - protein, 1217 aa, Homo sapiens
MKGMSHEPKSPSLGMLSTATRTTATVNPLTPSPLNGALVPSGSPATSSALSAQAAPSSSFAAALRKLAKQAEEPRGSSLSSESSPVSSPATNHSSPASTPKRVPMGPIIVPPGGHSVPSTPPVVTIAPTKTVNGVWRSESRQDAGSRSSSGGRERLIVEPPLPQEKAGGPAIPSHLLSTPYPFGLSPSSVVQDSRFPPLNLQRPVHHVVPPSTVTEDYLRSFRPYHTTDDLRMSSLPPLGLDPATAAAYYHPSYLAPHPFPHPAFRMDDSYCLSALRSPFYPIPTPGSLPPLHPSAMHLHLSGVRYPPELSHSSLAALHSERMSGLSAERLQMDEELRREREREREREREREADREREKEREREREKEREQEKEREREKERERELERQREQRAREKELLAAKALEPSFLPVAELHGLRGHATEERGKPSEQLTPTRAEKLKDAGLQAPKPVQHPLHPVPTPHHTVPSLISNHGIFSLPSSSAATALLIQRTNEEEKWLARQRRLRQEKEDRQSQVSEFRQQVLEQHLDMGRPPVPAEAEHRPESTTRPGPNRHEPGGRDPPQHFGGPPPLISPKPQLHAAPTALWNPVSLMDNTLETRRAESHSLHSHPAAFEPSRQAAVPLVKVERVFCPEKAEEGPRKREPAPLDKYQPPPPPPREGGSLEHQPFLPGPGPFLAELEKSTQTILGQQRASLPQAATFGELSGPLKPGSPYRPPVPRAPDPAYIYDEFLQQRRRLVSKLDLEERRRREAQEKGYYYDLDDSYDESDEEEVRAHLRCVAEQPPLKLDTSSEKLEFLQLFGLTTQQQKEELVAQKRRKRRRMLRERSPSPPTIQSKRQTPSPRLALSTRYSPDEMNNSPNFEEKKKFLTIFNLTHISAEKRKDKERLVEMLRAMKQKALSAAVADSLTNSPRDSPAVSLSEPATQQASLDVEKPVGVAASLSDIPKAAEPGKLEQVRPQELSRVQELAPASGEKARLSEAPGGKKSLSMLHYIRGAAPKDIPVPLSHSTNGKSKPWEPFVAEEFAHQFHESVLQSTQKALQKHKGSVAVLSAEQNHKVDTSVHYNIPELQSSSRAPPPQHNGQQEPPTARKGPPTQELDRDSEEEEEEDDEDGEDEEEVPKRKWQGIEAVFEAYQEHIEEQNLERQVLQTQCRRLEARHYSLSLTAEQLSHSVAELRSQKQKMVSERERLQAELDHLRKCLALPAMHWPRGYLKGYPR

SEQ ID NO: 268 - protein, 1467 aa, Homo sapiens
FRKDTDDIESPKRSIRDSGYIDCWDSERSDSLSPPRHGRDDSFDSLDSFGSRSRQTPSPDVVLRGSSDGRGSDSESDLPHRKLPDVKKDDMSARRTSHGEPKSAVPFNQYLPNKSNQTAYVPAPLRKKKAEREEYRKSWSTATSPLGGERPFSFPETIEEEGSEVGSAGEDNPAGQMNPGWKPSDGGCELPDGSGKEHPSSDGAVVAPAPKSEEKDAAEIQKRKRLEQAGIKVMPAAQRFASQKQLSEEKEAIRDIVLRKENSFLTHQHGNDSEAEGEVVCRLPDLEKDDFAARRARMNQTKPMVPLNQLLYGPYPKKGAEKSDGSKQLSKGISKKRSLEYKRNQGHTEEVKLIVTCNMRAQESEPVEGGLRKVPDLHKDDLAQQRIQGSLAPHREPPSFITLSNITEADLETWERLKVSEKARDGDVQHICASEPSPEIKAETAIRDDFANRKARASKKASSPRQKFVHFGPVTELDQQKWKRLSIGKAGPREDEEEVICHGSKIQMDSVSPVSAATSSLKGHQIFNRQNDCRTMNCGRGDYCRRASWLAPVPESQEEWVCSLGECPRGTEEVTSKQLPQDGKEETESAPRDSERLSKAERSEDSSQPLVCPLASECEASGTEEKLEKMTAPAWSGSGLKGQRKLDDSRKDDMMARRTGMSLRHTGSNPNQFLPVPFAKQQDVEESSKGLPMKDQRYGPRTPVSDDAESTSMFDMRCEEEAAVQPHSRARQEQLQLINNQLREEDDKWQDDLARWKSRRRSVSQDLIKKEEERKKMEKLLAGEDGTSERRKSIKTYREIVQEKERRERELHEAYKNARSQEEAEGILQQYIERFTISEAVLERLEMPKILERSHSTEPNLSSFLNDPNPMKYLRQQSLPPPKFTATVETTIARASVLDTSMSAGSGSPSKTVTPKAVPMLTPKPYSQPKNSQDVLKTFKVDGKVSVNGETVHREEEKERECPTVAPAHSLTKSQMFEGVARVHGSPLELKQDNGSIEINIKKPNSVPQELAATTEKTEPNSQEDKNDGGKSRKGNIELASSEPQHFTTTVTRCSPTVAFVEFPSSPQLKNDVSEEKDQKKPENEMSGKVELVLSQKVVKPKSPEPEATLTFPFLDKMPEANQLHLPNLNSQVDSPSSEKSPVMTPFKFWAWDPEEERRRQEKWQQEQERLLQERYQKEQDKLKEEWEKAQKEVEEEERRYYEEERKIIEDTVVPFTVSSSSADQLSTSSSMTEGSGTMNKIDLGNCQDEKQDRRWKKSFQGDDSDLLLKTRESDRLEEKGSLTEGALAHSGNPVSKGVHEDHQLDTEAGAPHCGTNPQLAQDPSQNQQTSNPTHSSEDVKPKTLPLDKSINHQIESPSERRKKSPREHFQAGPFSPCSPTPPGQSPNRSISGKKLCSSCGLPLGKGAAMIIETLNLYFHIQCFRCGICKGQLGDAVSGTDVRIRNGLLNCNDCYMRSRSAGQPTTL

SEQ ID NO: 269 - protein, 513 aa, Homo sapiens
MRQPPGESDMAVSDALLPSFSTFASGPAGREKTLRQAGAPNNRWREELSHMKRLPPVLPGRPYDLAAATVATDLESGGAGAACGGSNLAPLPRRETEEFNDLLDLDFILSNSLTHPPESVAATVSSSASASSSSSPSSSGPASAPSTCSFTYPIRAGNDPGVAPGGTGGGLLYGRESAPPPTAPFNLADINDVSPSGGFVAELLRPELDPVYIPPQQPQPPGGGLMGKFVLKASLSAPGSEYGSPSVISVSKGSPDGSHPVVVAPYNGGPPRTCPKIKQEAVSSCTHLGAGPPLSNGHRPAAHDFPLGRQLPSRTTPTLGLEEVLSSRDCHPALPLPPGFHPHPGPNYPSFLPDQMQPQVPPLHYQGQSRGFVARAGEPCVCWPHFGTHGMMLTPPSSPLELMPPGSCMPEEPKPKRGRRSWPRKRTATHTCDYAGCGKTYTKSSHLKAHLRTHTGEKPYHCDWDGCGWKFARSDELTRHYRKHTGHRPFQCQKCDRAFSRSDHLALHMKRHF

SEQ ID NO: 270 - protein, 283 aa, Homo sapiens
MDVLPMCSIFQELQIVHETGYFSALPSLEEYWQQTCLELERYLQSEPCYVSASEIKFDSQEDLWTKIILAREKKEESELKISSSPPEDTLISPSFCYNLETNSLNSDVSSESSDSSEELSPTAKFTSDPIGEVLVSSGKLSSSVTSTPPSSPELSREPSQLWGCVPGELPSPGKVRSGTSGKPGDKGNGDASPDGRRRVHRCHFNGCRKVYTKSSHLKAHQRTHTGEKPYRCSWEGCEWRFARSDELTRHFRKHTGAKPFKCSHCDRCFSRSDHLALHMKRHL

SEQ ID NO: 271 - protein, 131 aa, Homo sapiens
MAGIKALISLSFGGAIGLMFLMLGCALPIYNKYWPLFVLFFYILSPIPYCIARRLVDDTDAMSNACKELAIFLTTGIVVSAFGLPIVFARAHLIEWGACALVLTGNTVIFATILGFFLVFGSNDDFSWQQW

SEQ ID NO: 272 - protein, 325 aa, Homo sapiens
MANALASATCERCKGGFAPAEKIVNSNGELYHEQCFVCAQCFQQFPEGLFYEFEGRKYCEHDFQMLFAPCCHQCGEFIIGRVIKAMNNSWHPECFRCDLCQEVLADIGFVKNAGRHLCRPCHNREKARGLGKYICQKCHAIIDEQPLIFKNDPYHPDHFNCANCGKELTADARELKGELYCLPCHDKMGVPICGACRRPIEGRVVNAMGKQWHVEHFVCAKCEKPFLGHRHYERKGLAYCETHYNQLFGDVCFHCNRVIEGDVVSALNKAWCVNCFACSTCNTKLTLKNKFVEFDMKPVCKKCYEKFPLELKKRLKKLAETLGRK

SEQ ID NO: 273 - protein, 480 aa, Homo sapiens
MNMKASRVTLGEAGARARWPLGTPRAAATRREAAALPPVTLALLCLDGVFLSSAENDFVHRIQEELDRFLLQKQLSKVLLFPPLSSRLRYLIHRTAENFDLLSSFSVGEGWKRRTVICHQDIRVPSSDGLSGPCRAPASCPSRYHGPRPISNQGAAAVPRGARAGRWYRGRKPDQPLYVPRVLRRQEEWGLTSTSVLKREAPAGRDPEEPGDVGAGDPNSDQGLPVLMTQGTEDLKGPGQRCENEPLLDPVGPEPLGPESQSGKGDMVEMATRFGSTLQLDLEKGKESLLEKRLVAEEEEDEEEVEEDGPSSCSEDDYSELLQEITDNLTKKEIQIEKIHLDTSSFVEELPGEKDLAHVVEIYDFEPALKTEDLLATFSEFQEKGFRIQWVDDTHALGIFPCLASAAEALTREFSVLKIRPLTQGTKQSKLKALQRPKLLRLVKERPQTNATVARRLVARALGLQHKKKERPAVRGPLPP

SEQ ID NO: 274 - protein, 105 aa, Homo sapiens
MSDAAVDTSSEITTEDLKEKKEVVEEAENGRDAPAHGNANEENGEPEADNEVDEEEEEGGEEEGDGEEEDGDEDEGAESATGKRAAEDDEDNDVDTQKQKTDEDD

SEQ ID NO: 275 - protein, 774 aa, Homo sapiens
MERPLCSHLCSCLAMLALLSPLSLAQYDSWPHYPEYFQQPAPEYHQPQAPANVAKIQLRLAGQKRKHSEGRVEVYYDGQWGTVCDDDFSIHAAHVVCRELGYVEAKSWTASSSYGKGEGPIWLDNLHCTGNEATLAACTSNGWGVTDCKHTEDVGVVCSDKRIPGFKFDNSLINQIENLNIQVEDIRIRAILSTYRKRTPVMEGYVEVKEGKTWKQICDKHWTAKNSRVVCGMFGFPGERTYNTKVYKMFASRRKQRYWPFSMDCTGTEAHISSCKLGPQVSLDPMKNVTCENGLPAVVSCVPGQVFSPDGPSRFRKAYKPEQPLVRLRGGAYIGEGRVEVLKNGEWGTVCDDKWDLVSASVVCRELGFGSAKEAVTGSRLGQGIGPIHLNEIQCTGNEKSIIDCKFNAESQGCNHEEDAGVRCNTPAMGLQKKLRLNGGRNPYEGRVEVLVERNGSLVWGMVCGQNWGIVEAMVVCRQLGLGFASNAFQETWYWHGDVNSNKVVMSGVKCSGTELSLAHCRHDGEDVACPQGGVQYGAGVACSETAPDLVLNAEMVQQTTYLEDRPMFMLQCAMEENCLSASAAQTDPTTGYRRLLRFSSQIHNNGQSDFRPKNGRHAWIWHDCHRHYHSMEVFTHYDLLNLNGTKVAEGHKASFCLEDTECEGDIQKNYECANFGDQGITMGCWDMYRHDIDCQWVDITDVPPGDYLFQVVINPNFEVAESDYSNNIMKCRSRYDGHRIWMYNCHIGGSFSEETEKKFEHFSGLLNNQLSPQ

SEQ ID NO: 276 - protein, 1303 aa, Homo sapiens
MPGPRGAAGGLAPEMRGAGAAGLLALLLLLLLLLLGLGGRVEGGPAGERGAGGGGALARERFKVVFAPVICKRTCLKGQCRDSCQQGSNMTLIGENGHSTDTLTGSGFRVVVCPLPCMNGGQCSSRNQCLCPPDFTGRFCQVPAGGAGGGTGGSGPGLSRTGALSTGALPPLAPEGDSVASKHAIYAVQVIADPPGPGEGPPAQHAAFLVPLGPGQISAEVQAPPPVVNVRVHHPPEASVQVHRIESSNAESAAPSQHLLPHPKPSHPRPPTQKPLGRCFQDTLPKQPCGSNPLPGLTKQEDCCGSIGTAWGQSKCHKCPQLQYTGVQKPGPVRGEVGADCPQGYKRLNSTHCQDINECAMPGVCRHGDCLNNPGSYRCVCPPGHSLGPSRTQCIADKPEEKSLCFRLVSPEHQCQHPLTTRLTRQLCCCSVGKAWGARCQRCPTDGTAAFKEICPAGKGYHILTSHQTLTIQGESDFSLFLHPDGPPKPQQLPESPSQAPPPEDTEEERGVTTDSPVSEERSVQQSHPTATTTPARPYPELISRPSPPTMRWFLPDLPPSRSAVEIAPTQVTETDECRLNQNICGHGECVPGPPDYSCHCNPGYRSHPQHRYCVDVNECEAEPCGPGRGICMNTGGSYNCHCNRGYRLHVGAGGRSCVDLNECAKPHLCGDGGFCINFPGHYKCNCYPGYRLKASRPPVCEDIDECRDPSSCPDGKCENKPGSFKCIACQPGYRSQGGGACRDVNECAEGSPCSPGWCENLPGSFRCTCAQGYAPAPDGRSCLDVDECEAGDVCDNGICSNTPGSFQCQCLSGYHLSRDRSHCEDIDECDFPAACIGGDCINTNGSYRCLCPQGHRLVGGRKCQDIDECSQDPSLCLPHGACKNLQGSYVCVCDEGFTPTQDQHGCEEVEQPHHKKECYLNFDDTVFCDSVLATNVTQQECCCSLGAGWGDHCEIYPCPVYSSAEFHSLCPDGKGYTQDNNIVNYGIPAHRDIDECMLFGSEICKEGKCVNTQPGYECYCKQGFYYDGNLLECVDVDECLDESNCRNGVCENTRGGYRCACTPPAEYSPAQRQCLSPEEMDVDECQDPAACRPGRCVNLPGSYRCECRPPWVPGPSGRDCQLPESPAERAPERRDVCWSQRGEDGMCAGPLAGPALTFDDCCCRQGRGWGAQCRPCPPRGAGSHCPTSQSESNSFWDTSPLLLGKPPRDEDSSEEDSDECRCVSGRCVPRPGGAVCECPGGFQLDASRARCVDIDECRELNQRGLLCKSERCVNTSGSFRCVCKAGFARSRPHGACVPQRRR

SEQ ID NO: 277 - protein, 527 aa, Homo sapiens
MENQEKASIAGHMFDVVVIGGGISGLSAAKLLTEYGVSVLVLEARDRVGGRTYTIRNEHVDYVDVGGAYVGPTQNRILRLSKELGIETYKVNVSERLVQYVKGKTYPFRGAFPPVWNPIAYLDYNNLWRTIDNMGKEIPTDAPWEAQHADKWDKMTMKELIDKICWTKTARRFAYLFVNINVTSEPHEVSALWFLWYVKQCGGTTRIFSVTNGGQERKFVGGSGQVSERIMDLLGDQVKLNHPVTHVDQSSDNIIIETLNHEHYECKYVINAIPPTLTAKIHFRPELPAERNQLIQRLPMGAVIKCMMYYKEAFWKKKDYCGCMIIEDEDAPISITLDDTKPDGSLPAIMGFILARKADRLAKLHKEIRKKKICELYAKVLGSQEALHPVHYEEKNWCEEQYSGGCYTAYFPPGIMTQYGRVIRQPVGRIFFAGTETATKWSGYMEGAVEAGERAAREVLNGLGKVTEKDIWVQEPESKDVPAVEITHTFWERNLPSVSGLLKIIGFSTSVTALGFVLYKYKLLPRS

SEQ ID NO: 278 - protein, 382 aa, Homo sapiens
MDGETAEEQGGPVPPPVAPGGPGLGGAPGGRREPKKYAVTDDYQLSKQVLGLGVNGKVLECFHRRTGQKCALKLLYDSPKARQEVDHHWQASGGPHIVCILDVYENMHHGKRCLLIIMECMEGGELFSRIQERGDQAFTEREAAEIMRDIGTAIQFLHSHNIAHRDVKPENLLYTSKEKDAVLKLTDFGFAKETTQNALQTPCYTPYYVAPEVLGPEKYDKSCDMWSLGVIMYILLCGFPPFYSNTGQAISPGMKRRIRLGQYGFPNPEWSEVSEDAKQLIRLLLKTDPTERLTITQFMNHPWINQSMVVPQTPLHTARVLQEDKDHWDEVKEEMTSALATMRVDYDQVKIKDLKTSNNRLLNKRRKKQAGSSSASQGCNNQ

SEQ ID NO: 279 - protein, 332 aa, Homo sapiens
MGAQFSKTAAKGEAAAERPGEAAVASSPSKANGQENGHVKVNGDASPAAAESGAKEELQANGSAPAADKEEPAAAGSGAASPSAAEKGEPAAAAAPEAGASPVEKEAPAEGEAAEPGSPTAAEGEAASAASSTSSPKAEDGATPSPSNETPKKKKKRFSFKKSFKLSGFSFKKNKKEAGEGGEAEAPAAEGGKDEAAGGAAAAAAEAGAASGEQAAAPGEEAAAGEEGAAGGDPQEAKPQEAAVAPEKPPASDETKAAEEPSKVEEKKAEEAGASAAACEAPSAAGPGAPPEQEAAPAEEPAAAAASSACAAPSQEAQPECSPEAPPAEAAE

SEQ ID NO: 280 - protein, 291 aa, Homo sapiens
MERKRWECPALPQGWEREEVPRRSGLSAGHRDVFYYSPSGKKFRSKPQLARYLGGSMDLSTFDFRTGKMLMSKMNKSRQRVRYDSSNQVKGKPDLNTALPVRQTASIFKQPVTKITNHPSNKVKSDPQKAVDQPRQLFWEKKLSGLNAFDIAEELVKTMDLPKGLQGVGPGCTDETLLSAIASALHTSTMPITGQLSAAVEKNPGVWLNTTQPLCKAFMVTDEDIRKQEELVQQVRKRLEEALMADMLAHVEELARDGEAPLDKACAEDDDEEDEEEEEEEPDPDPEMEHV

SEQ ID NO: 281 - protein, 1124 aa, Homo sapiens
MGENEDEKQAQAGQVFENFVQASTCKGTLQAFNILTRHLDLDPLDHRNFYSKLKSKVTTWKAKALWYKLDKRGSHKEYKRGKSCTNTKCLIVGGGPCGLRTAIELAYLGAKVVVVEKRDSFSRNNVLHLWPFTIHDLRGLGAKKFYGKFCAGSIDHISIRQLQLILFKVALMLGVEIHVNVEFVKVLEPPEDQENQKIGWRAEFLPTDHSLSEFEFDVIIGADGRRNTLEGFRRKEFRGKLAIAITANFINRNSTAEAKVEEISGVAFIFNQKFFQDLKEETGIDLENIVYYKDCTHYFVMTAKKQSLLDKGVIINDYIDTEMLLCAENVNQDNLLSYAREAADFATNYQLPSLDFAMNHYGQPDVAMFDFTCMYASENAALVRERQAHQLLVALVGDSLLEPFWPMGTGCARGFLAAFDTAWMVKSWNQGTPPLELLAERESLYRLLPQTTPENINKNFEQYTLDPGTRYPNLNSHCVRPHQVKHLYITKELEHYPLERLGSVRRSVNLSRKESDIRPSKLLTWCQQQTEGYQHVNVTDLTTSWRSGLALCAIIHRFRPELINFDSLNEDDAVENNQLAFDVAEREFGIPPVTTGKEMASAQEPDKLSMVMYLSKFYELFRGTPLRPVDSWRKNYGENADLSLAKSSISNNYLNLTFPRKRTPRVDGQTGENDMNKRRRKGFTNLDEPSNFSSRSLGSNQECGSSKEGGNQNKVKSMANQLLAKFEESTRNPSLMKQERRVSGIGKPVLCSSSGPPVHSCCPKPEEATPSPSPPLKRQFPSVVVTGHVLRELKQVSAGSECLSRPWRARAKSDLQLGGTENFATLPSTRPRAQALSGVLWRLQQVEEKILQKRAQNLANREFHTKNIKEKAAHLASMFGHGDFPQNKLLSKGLSHTHPPSPPSRLPSPDPAASSSPSTVDSASPARKEKKSPSGFHFHPSHLRTVHPQLTVGKVSSGIGAAAEVLVNLYMNDHRPKAQATSPDLESMRKSFPLNLGGSDTCYFCKKRVYVMERLSAEGHFFHRECFRCSICATTLRLAAYTFDCDEGKFYCKPHFIHCKTNSKQRKRRAELKQQREEEATWQEQEAPRRDTPTESSCAVAAIGTLEGSPPVHFSLPVLHPLLG

SEQ ID NO: 282 - protein, 454 aa, Homo sapiens
LDFFRVVENQQPPATMPLNVSFTNRNYDLDYDSVQPYFYCDEEENFYQQQQQSELQPPAPSEDIWKKFELLPTPPLSPSRRSGLCSPSYVAVTPFSLRGDNDGGGGSFSTADQLEMVTELLGGDMVNQSFICDPDDETFIKNIIIQDCMWSGFSAAAKLVSEKLASYQAARKDSGSPNPARGHSVCSTSSLYLQDLSAAASECIDPSVVFPYPLNDSSSPKSCASQDSSAFSPSSDSLLSSTESSPQGSPEPLVLHEETPPTTSSDSEEEQEDEEEIDVVSVEKRQAPGKRSESGSPSAGGHSKPPHSPLVLKRCHVSTHQHNYAAPPSTRKDYPAAKRVKLDSVRVLRQISNNRKCTSPRSSDTEENVKRRTHNVLERQRRNELKRSFFALRDQIPELENNEKAPKVVILKKATAYILSVQAEEQKLISEEDLLRKRREQLKHKLEQLRNSCA

SEQ ID NO: 283 - protein, 1098 aa, Homo sapiens
MGSKERFHWQSHNVKQSGVDDMVLLPQITEDAIAANLRKRFMDDYIFTYIGSVLISVNPFKQMPYFTDREIDLYQGAAQYENPPHIYALTDNMYRNMLIDCENQCVIISGESGAGKTVAAKYIMGYISKVSGGGEKVQHVKDIILQSNPLLEAFGNAKTVRNNNSSRFGKYFEIQFSRGGEPDGGKISNFLLEKSRVVMQNENERNFHIYYQLLEGASQEQRQNLGLMTPDYYYYLNQSDTYQVDGTDDRSDFGETLSAMQVIGIPPSIQQLVLQLVAGILHLGNISFCEDGNYARVESVDLLAFPAYLLGIDSGRLQEKLTSRKMDSRWGGRSESINVTLNVEQAAYTRDALAKGLYARLFDFLVEAINRAMQKPQEEYSIGVLDIYGFEIFQKNGFEQFCINFVNEKLQQIFIELTLKAEQEEYVQEGIRWTPIQYFNNKVVCDLIENKLSPPGIMSVLDDVCATMHATGGGADQTLLQKLQAAVGTHEHFNSWSAGFVIHHYAGKVSYDVSGFCERNRDVLFSDLIELMQTSEQAFLRMLFPEKLDGDKKGRPSTAGSKIKKQANDLVATLMRCTPHYIRCIKPNETKRPRDWEENRVKHQVEYLGLKENIRVRRAGFAYRRQFAKFLQRYAILTPETWPRWRGDERQGVQHLLRAVNMEPDQYQMGSTKVFVKNPESLFLLEEVRERKFDGFARTIQKAWRRHVAVRKYEEMREEASNILLNKKERRRNSINRNFVGDYLGLEERPELRQFLGKRERVDFADSVTKYDRRFKPIKRDLILTPKCVYVIGREKVKKGPEKGQVCEVLKKKVDIQALRGVSLSTRQDDFFILQEDAADSFLESVFKTEFVSLLCKRFEEATRRPLPLTFSDTLQFRVKKEGWGGGGTRSVTFSRGFGDLAVLKVGGRTLTVSVGDGLPKSSKPTRKGMAKGKPRRSSQAPTRAAPAPPRGMDRNGVPPSARGGPLPLEIMSGGGTHRPPRGPPSTSLGASRRPRARPPSEHNTEFLNVPDQGMAGMQRKRSVGQRPVPGVGRPKPQPRTHGPRCRALYQYVGQDVDELSFNVNEVIEILMEDPSGWWKGRLHGQEGLFPGNYVEKI

SEQ ID NO: 284 - protein, 590 aa, Homo sapiens
MAGAIASRMSFSSLKRKQPKTFTVRIVTMDAEMEFNCEMKWKGKDLFDLVCRTLGLRETWFFGLQYTIKDTVAWLKMDKKVLDHDVSKEEPVTFHFLAKFYPENAEEELVQEITQHLFFLQVKKQILDEKIYCPPEASVLLASYAVQAKYGDYDPSVHKRGFLAQEELLPKRVINLYQMTPEMWEERITAWYAEHRGRARDEAEMEYLKIAQDLEMYGVNYFAIRNKKGTELLLGVDALGLHIYDPENRLTPKISFPWNEIRNISYSDKEFTIKPLDKKIDVFKFNSSKLRVNKLILQLCIGNHDLFMRRRKADSLEVQQMKAQAREEKARKQMERQRLAREKQMREEAERTRDELERRLLQMKEEATMANEALMRSEETADLLAEKAQITEEEAKLLAQKAAEAEQEMQRIKATAIRTEEEKRLMEQKVLEAEVLALKMAEESERRAKEADQLKQDLQEAREAERRAKQKLLEIATKPTYPPMNPIPAPLPPDIPSFNLIGDSLSFDFKDTDMKRLSMEIEKEKVEYMEKSKHLQEQLNELKTEIEALKLKERETALDILHNENSDRGGSSKHNTIKKPQAQGRRPICI

SEQ ID NO: 285 - protein, 152 aa, Homo sapiens
MDSGTEEYELNGGLPPGTPGSPDASPARWGWRHGPINVNHYASKKSAAESMLDIALLMANASQLKAVVEQGPSFAFYVPLVVLISISLVLQIGVGVLLIFLVKYDLNNPAKHAKLDFLNNLATGLVFIIVVVNIFITAFGVQKPLMDMAPQQ

SEQ ID NO: 286 - protein, 503 aa, Homo sapiens
MEYMAESTDRSPGHILCCECGVPISPNPANICVACLRSKVDISQGIPKQVSISFCKQCQRYFQPPGTWIQCALESRELLALCLKKIKAPLSKVRLVDAGFVWTEPHSKRLKVKLTIQKEVMNGAILQQVFVVDYVVQSQMCGDCHRVEAKDFWKAVIQVRQKTLHKKTFYYLEQLILKYGMHQNTLRIKEIHDGLDFYYSSKQHAQKMVEFLQCTVPCRYKASQRLISQDIHSNTYNYKSTFSVEIVPICKDNVVCLSPKLAQSLGNMNQICVCIRVTSAIHLIDPNTLQVADIDGSTFWSHPFNSLCHPKQLEEFIVMECSIVQDIKRAAGAGMISKKHTLGEVWVQKTSEMNTDKQYFCRTHLGHLLNPGDLVLGFDLANCNLNDEHVNKMNSDRVPDVVLIKKSYDRTKRQRRRNWKLKELARERENMDTDDERQYQDFLEDLEEDEAIRKNVNIYRDSAIPVESDTDDEGAPRISLAEMLEDLHISQDATGEEGASMLT

SEQ ID NO: 287 - protein, 661 aa, Homo sapiens
MEGAAAPVAGDRPDLGLGAPGSPREAVAGATAALEPRKPHGVKRHHHKHNLKHRYELQETLGKGTYGKVKRATERFSGRVVAIKSIRKDKIKDEQDMVHIRREIEIMSSLNHPHIISIYEVFENKDKIVIIMEYASKGELYDYISERRRLSERETRHFFRQIVSAVHYCHKNGVVHRDLKLENILLDDNCNIKIADFGLSNLYQKDKFLQTFCGSPLYASPEIVNGRPYRGPEVDSWALGVLLYTLVYGTMPFDGFDHKNLIRQISSGEYREPTQPSDARGLIRWMLMVNPDRRATIEDIANHWWVNWGYKSSVCDCDALHDSESPLLARIIDWHHRSTGLQADTEAKMKGLAKPTTSEVMLERQRSLKKSKKENDFAQSGQDAVPESPSKLSSKRPKGILKKRSNSEHRSHSTGFIEGVVGPALPSTFKMEQDLCRTGVLLPSSPEAEVPGKLSPKQSATMPKKGILKKTQQRESGYYSSPERSESSELLDSNDVMGSSIPSPSPPDPARVTSHSLSCRRKGILKHSSKYSAGTMDPALVSPEMPTLESLSEPGVPAEGLSRSYSRPSSVISDDSVLSSDSFDLLDLQENRPARQRIRSCVSAENFLQIQDFEGLQNRPRPQYLKRYRNRLADSSFSLLTDMDDVTQVYKQALEICSKLN

SEQ ID NO: 288 - protein, 522 aa, Homo sapiens
MSGFNFGGTGAPTGGFTFGTAKTATTTPATGFSFSTSGTGGFNFGAPFQPATSTPSTGLFSLATQTPATQTTGFTFGTATLASGGTGFSLGIGASKLNLSNTAATPAMANPSGFGLGSSNLTNAISSTVTSSQGTAPTGFVFGPSTTSVAPATTSGGFSFTGGSTAQPSGFNIGSAGNSAQPTAPATLPFTPATPAATTAGATQPAAPTPTATITSTGPSLFASIATAPTSSATTGLSLCTPVTTAGAPTAGTQGFSLKAPGAASGTSTTTSTAATATATTTSSSSTTGFALNLKPLAPAGIPSNTAAAVTAPPGPGAAAGAAASSAMTYAQLESLINKWSLELEDQERHFLQQATQVNAWDRTLIENGEKITSLHREVEKVKLDQKRLDQELDFILSQQKELEDLLSPLEELVKEQSGTIYLQHADEEREKTYKLAENIDAQLKRMAQDLKDIIEHLNTSGAPADTSDPLQQICKILNAHMDSLQWIDQNSALLQRKVEEVTKVCEGRRKEQERSFRITFD

SEQ ID NO: 289 - protein, 794 aa, Homo sapiens
MGQSGRSRHQKRARAQAQLRNLEAYAANPHSFVFTRGCTGRNIRQLSLDVRRVMEPLTASRLQVRKKNSLKDCVAVAGPLGVTHFLILSKTETNVYFKLMRLPGGPTLTFQVKKYSLVRDVVSSLRRHRMHEQQFAHPPLLVLNSFGPHGMHVKLMATMFQNLFPSINVHKVNLNTIKRCLLIDYNPDSQELDFRHYSIKVVPVGASRGMKKLLQEKFPNMSRLQDISELLATGAGLSESEAEPDGDHNITELPQAVAGRGNMRAQQSAVRLTEIGPRMTLQLIKVQEGVGEGKVMFHSFVSKTEEELQAILEAKEKKLRLKAQRQAQQAQNVQRKQEQREAHRKKSLEGMKKARVGGSDEEASGIPSRTASLELGEDDDEQEDDDIEYFCQAVGEAPSEDLFPEAKQKRLAKSPGRKRKRWEMDRGAKSCPANFLAAADDKLSGFQGDFLWPILVVEFLVAVASNGLALYRFSIRKQRPWHPAVVFSVQLAVSDLLCALTLPPLAAYLYPPKHWRYGEAACRLERFLFTCNLLGSVIFITCISLNRYLGIVHPFFARSHLRPKHAWAVSAAGWVLAALLAMPTLSFSHLKRPQQGAGNCSVARPEACIKCLGTADHGLAAYRAYSLVLAGLGCGLPLLLTLAAYGALGRAVLRSPGMTVAEKLRVAALVASGVALYASSYVPYHIMRVLNVDARRRWSTRCPSFADIAQATAALELGPYVGYQVMRGLMPLAFCVHPLLYMAAVPSLGCCCRHCPGYRDSWNPEDAKSTGQALPLNATAAPKPSEPQSRELSQ

SEQ ID NO: 290 - protein, 535 aa, Homo sapiens
MKLWVSALLMAWFGVLSCVQAEFFTSIGHMTDLIYAEKELVQSLKEYILVEEAKLSKIKSWANKMEALTSKSAADAEGYLAHPVNAYKLVKRLNTDWPALEDLVLQDSAAGFIANLSVQRQFFPTDEDEIGAAKALMRLQDTYRLDPGTISRGELPGTKYQAMLSVDDCFGMGRSAYNEGDYYHTVLWMEQVLKQLDAGEEATTTKSQVLDYLSYAVFQLGDLHRALELTRRLLSLDPSHERAGGNLRYFEQLLEEEREKTLTNQTEAELATPEGIYERPVDYLPERDVYESLCRGEGVKLTPRRQKRLFCRYHHGNRAPQLLIAPFKEEDEWDSPHIVRYYDVMSDEEIERIKEIAKPKLARATVRDPKTGVLTVASYRVSKSSWLEEDDDPVVARVNRRMQHITGLTVKTAELLQVANYGVGGQYEPHFDFSRNDERDTFKHLGTGNRVATFLNYMSDVEAGGATVFPDLGAAIWPKKGTAVFWYNLLRSGEGDYRTRHAACPVLVGCKWVSNKWFHERGQEFLRPCGSTEVD

SEQ ID NO: 291 - protein, 458 aa, Homo sapiens
MTKYPDNLSDSLFSGDEENAGTEEIKNEINGNWISASSINEARINAKAKRRLRKNSSRDSGRGDSVSDSGSDALRSGLTVPTSPKGRLLDRRSRSGKGRGLPKKGGAGGKGVWGTPGQVYDVEEVDVKDPNYDDDQENCVYETVVLPLDERAFEKTLTPIIQEYFEHGDTNEVAEMLRDLNLGEMKSGVPVLAVSLALEGKASHREMTSKLLSDLCGTVMSTTDVEKSFDKLLKDLPELALDTPRAPQLVGQFIARAVGDGILCNTYIDSYKGTVDCVQARAALDKATVLLSMSKGGKRKDSVWGSGGGQQSVNHLVKEIDMLLKEYLLSGDISEAEHCLKELEVPHFHHELVYEAIIMVLESTGESTFKMILDLLKSLWKSSTITVDQMKRGYERIYNEIPDINLDVPHSYSVLERFVEECFQAGIISKQLRDLCPSRGRKRFVSEGDGGRLKPESY

SEQ ID NO: 292 - protein, 529 aa, Homo sapiens
MVRTQTESSTPPGIPGGSRQGPAMDGTAAEPRPGAGSLQHAQPPPQPRKKRPEDFKFGKILGEGSFSTVVLARELATSREYAIKILEKRHIIKENKVPYVTRERDVMSRLDHPFFVKLYFTFQDDEKLYFGLSYAKNGELLKYIRKIGSFDETCTRFYTAEIVSALEYLHGKGIIHRDLKPENILLNEDMHIQITDFGTAKVLSPESKQARANSFVGTAQYVSPELLTEKSACKSSDLWALGCIIYQLVAGLPPFRAGNEYLIFQKIIKLEYDFPEKFFPKARDLVEKLLVLDATKRLGCEEMEGYGPLKAHPFFESVTWENLHQQTPPKLTAYLPAMSEDDEDCYGNYDNLLSQFGCMQVSSSSSSHSLSASDTGLPQRSGSNIEQYIHDLDSNSFELDLQFSEDEKRLLLEKQAGGNPWHQFVENNLILKMGPVDKRKGLFARRRQLLLTEGPHLYYVDPVNKVLKGEIPWSQELRPEAKNFKTFFVHTPNRTYYLMDPSGNAHKWCRKIQEVWRQRYQSHPDAAVQ

SEQ ID NO: 293 - protein, 851 aa, Homo sapiens
MHKDEFHLKFFMCVIQSRQLVRTPQRTAGEASTSSMLIPKPPPKTDILKSLDTMDDPDTVGSIPVFKTEWIMTHEEHHAAKTLGIGKAIAVLTSGGDAQGMNAAVRAVVRVGIFTGARVFFVHEGYQGLVDGGDHIKEATWESVSMMLQLGGTVIGSARCKDFREREGRLRAAYNLVKRGITNLCVIGGDGSLTGADTFRSEWSDLLSDLQKAGKITDEEATKSSYLNIVGLVGSIDNDFCGTDMTIGTDSALHRIMEIVDAITTTAQSHQRTFVLEVMGRHCGYLALVTSLSCGADWVFIPECPPDDDWEEHLCRRLSETRTRGSRLNIIIVAEGAIDKNGKPITSEDIKNLVVKRLGYDTRVTVLGHVQRGGTPSAFDRILGSRMGVEAVMALLEGTPDTPACVVSLSGNQAVRLPLMECVQVTKDVTKAMDEKKFDEALKLRGRSFMNNWEVYKLLAHVRPPVSKSGSHTVAVMNVGAPAAGMNAAVRSTVRIGLIQGNRVLVVHDGFEGLAKGQIEEAGWSYVGGWTGQGGSKLGTKRTLPKKSFEQISANITKFNIQGLVIIGGFEAYTGGLELMEGRKQFDELCIPFVVIPATVSNNVPGSDFSVGADTALNTICTTCDRIKQSAAGTKRRVFIIETMGGYCGYLATMAGLAAGADAAYIFEEPFTIRDLQANVEHLVQKMKTTVKRGLVLRNEKCNENYTTDFIFNLYSEEGKGIFDSRKNVLGHMQQGGSPTPFDRNFATKMGAKAMNWMSGKIKESYRNGRIFANTPDSGCVLGMRKRALVFQPVAELKDQTDFEHRIPKEQWWLKLRPILKILAKYEIDLDTSDHAHLEHITRKRSGEAAV

SEQ ID NO: 294 - protein, 152 aa, Homo sapiens
MKSPDEVLREGELEKRSDSLFQLWKKKRGVLTSDRLSLFPASPRARPKELRFHSILKVDCVERTGKYVYFTIVTTDHKEIDFRCAGESCWNAAIALALIDFQNRRALQDFRSRQERTAPAAPAEDAVAAAAAAPSEPSEPSRPSPQPKPRTP

SEQ ID NO: 295 - protein, 329 aa, Homo sapiens
MSGVVPTAPEQPAGEMENQTKPPDPRPDAPPEYNSHFLPGPPGTAVPPPTGYPGGLPMGYYSPQQPSTFPLYQPVGGIHPVRYQPGKYPMPNQSVPITWMPGPTPMANCPPGLEYLVQLDNIHVLQHFEPLEMMTCFETNNRYDIKNNSDQMVYIVTEDTDDFTRNAYRTLRPFVLRVTDCMGREIMTMQRPFRCTCCCFCCPSARQELEVQCPPGVTIGFVAEHWNLCRAVYSIQNEKKENVMRVRGPCSTYGCGSDSVFEVKSLDGISNIGSIIRKWNGLLSAMADADHFDIHFPLDLDVKMKAMIFGACFLIDFMYFERSPPQRSR

SEQ ID NO: 296 - protein, 324 aa, Homo sapiens
MPELAVQKVVVHPLVLLSVVDHFNRIGKVGNQKRVVGVLLGSWQKKVLDVSNSFAVPFDEDDKDDSVWFLDHDYLENMYGMFKKVNARERIVGWYHTGPKLHKNDIAINELMKRYCPNSVLVIIDVKPKDLGLPTEAYISVEEVHDDGTPTSKTFEHVTSEIGAEEAEEVGVEHLLRDIKDTTVGTLSQRITNQVHGLKGLNSKLLDIRSYLEKVATGKLPINHQIIYQLQDVFNLLPDVSLQEFVKAFYLKTNDQMVVVYLASLIRSVVALHNLINNKIANRDAEKKEGQEKEESKKDRKEDKEKDKDKEKSDVKKEEKKEKK

SEQ ID NO: 297 - protein, 557 aa, Homo sapiens
MDGIVPDIAVGTKRGSDELFSTCVTNGPFIMSSNSASAANGNDSKKFKGDSRSAGVPSRVIHIRKLPIDVTEGEVISLGLPFGKVTNLLMLKGKNQAFIEMNTEEAANTMVNYYTSVTPVLRGQPIYIQFSNHKELKTDSSPNQARAQAALQAVNSVQSGNLALAASAAAVDAGMAMAGQSPVLRIIVENLFYPVTLDVLHQIFSKFGTVLKIITFTKNNQFQALLQYADPVSAQHAKLSLDGQNIYNACCTLRIDFSKLTSLNVKYNNDKSRDYTRPDLPSGDSQPSLDQTMAAAFGAPGIISASPYAGAGFPPTFAIPQAAGLSVPNVHGALAPLAIPSAAAAAAAAGRIAIPGLAGAGNSVLLVSNLNPERVTPQSLFILFGVYGDVQRVKILFNKKENALVQMADGNQAQLAMSHLNGHKLHGKPIRITLSKHQNVQLPREGQEDQGLTKDYGNSPLHRFKKPGSKNFQNIFPPSATLHLSNIPPSVSEEDLKVLFSSNGGVVKGFKFFQKDRKMALIQMGSVEEAVQALIDLHNHDLGENHHLRVSFSKSTI

SEQ ID NO: 298 - protein, 750 aa, Homo sapiens
MADLIDGYCRLVNGTSQSFIIRPQKEGERALPSIPKLANSEKQGMRTHAVSVSGVSHCQHKVKKARRFLPLVFCSHDPPSTDEISGDETDDYAEIIDEEDTYTMPSTRDYEIQRERIELGRCIGEGQFGDVHQGIYMSPENPALAVAIKTCKNCTSDSVREKFLQEALTMRQFDHPHIVKLIGVITENPVWIIMELCTLGELRSFLQVRKYSLDLASLILYAYQLSTALAYLESKRFVHRDIAARNVLVSSNDCVKLGDFGLSRYMEDSTYYKASKGKLPIKWMAPESINFRRFTSASDVWMFGVCMWEILMHGVKPFQGVKNNDVIGRIENGERLPMPPNCPPTLYSLMTKCWAYDPSRRPRFTELKAQLSTILEEEKAQQEERMRMESRRQATVSWDSGGSDEAPPKPSRPGYPSPRSSEGFYPSPQHMVQTNHYQVSGYPGSHGITAMAGSIYPGQASLLDQTDSWNHRPQEIAMWQPNVEDSTVLDLRGIGQVLPTHLMEERLIRQQQEMEEDQRWLEKEERFLKPDVRLSRGSIDREDGSLQGPIGNQHIYQPVGKPDPAAPPKKPPRPGAPGHLGSLASLSSPADSYNEGVKPWRLQPQEISPPPTANLDRSNDKVYENVTGLVKAVIEMSSKIQPAPPEEYVPMVKEVGLALRTLLATVDETIPLLPASTHREIEMAQKLLNSDLGELINKMKLAQQYVMTSLQQEYKKQMLTAAHALAVDAKNLLDVIDQARLKMLGQTRPH

SEQ ID NO: 299 - protein, 319 aa, Homo sapiens
MVGEMETKEKPKPTPDYLMQLMNDKKLMSSLPNFCGIFNHLERLLDEEISRVRKDMYNDTLNGSTEKRSAELPDAVGPIVQLQEKLYVPVKEYPDFNFVGRILGPRGLTAKQLEAETGCKIMVRGKGSMRDKKKEEQNRGKPNWEHLNEDLHVLITVEDAQNRAEIKLKRAVEEVKKLLVPAAEGEDSLKKMQLMELAILNGTYRDANIKSPALAFSLAATAQAAPRIITGPAPVLPPAALRTPTPAGPTIMPLIRQIQTAVMPNGTPHPTAAIVPPGPEAGLIYTPYEYPYTLAPATSILEYPIEPSGVLGKFFSPWG

SEQ ID NO: 300 - protein, 206 aa, Homo sapiens
MAANKPKGQNSLALHKVIMVGSGGVGKSALTLQFMYDEFVEDYEPTKADSYRKKVVLDGEEVQIDILDTAGQEDYAAIRDNYFRSGEGFLCVFSITEMESFAATADFREQILRVKEDENVPFLLVGNKSDLEDKRQVSVEEAKNRAEQWNVNYVETSAKTRANVDKVFFDLMREIRARKMEDSKEKNGKKKRKSLAKRIRERCCIL

SEQ ID NO: 301 - protein, 164 aa, Homo sapiens
MASPHQEPKPGDLIEIFRLGYEHWALYIGDGYVIHLAPPSEYPGAGSSSVFSVLSNSAEVKRERLEDVVGGCCYRVNNSLDHEYQPRPVEVIISSAKEMVGQKMKYSIVSRNCEHFVTQLRYGKSRCKQVEKAKVEVGVATALGILVVAGCSFAIRRYQKKATA

SEQ ID NO: 302 - protein, 1097 aa, Homo sapiens
MATQVMGQSSGGGGLFTSSGNIGMALPNDMYDLHDLSKAELAAPQLIMLANVALTGEVNGSCCDYLVGEERQMAELMPVGDNNFSDSEEGEGLEESADIKGEPHGLENMELRSLELSVVEPQPVFEASGAPDIYSSNKDLPPETPGAEDKGKSSKTKPFRCKPCQYEAESEEQFVHHIRVHSAKKFFVEESAEKQAKARESGSSTAEEGDFSKGPIRCDRCGYNTNRYDHYTAHLKHHTRAGDNERVYKCIICTYTTVSEYHWRKHLRNHFPRKVYTCGKCNYFSDRKNNYVQHVRTHTGERPYKCELCPYSSSQKTHLTRHMRTHSGEKPFKCDQCSYVASNQHEVTRHARQVHNGPKPLNCPHCDYKTADRSNFKKHVELHVNPRQFNCPVCDYAASKKCNLQYHFKSKHPTCPNKTMDVSKVKLKKTKKREADLPDNITNEKTEIEQTKIKGDVAGKKNEKSVKAEKRDVSKEKKPSNNVSVIQVTTRTRKSVTEVKEMDVHTGSNSEKFSKTKKSKRKLEVDSHSLHGPVNDEESSTKKKKKVESKSKNNSQEVPKGDSKVEENKKQNTCMKKSTKKKTLKNKSSKKSSKPPQKEPVEKGSAQMDPPQMGPAPTEAVQKGPVQVEPPPPMEHAQMEGAQIRPAPDEPVQMEVVQEGPAQKELLPPVEPAQMVGAQIVLAHMELPPPMETAQTEVAQMGPAPMEPAQMEVAQVESAPMQVVQKEPVQMELSPPMEVVQKEPVQIELSPPMEVVQKEPVKIELSPPIEVVQKEPVQMELSPPMGVVQKEPAQREPPPPREPPLHMEPISKKPPLRKDKKEKSNMQSERARKEQVLIEVGLVPVKDSWLLKESVSTEDLSPPSPPLPKENLREEASGDQKLLNTGEGNKEAPLQKVGAEEADESLPGLAANINESTHISSSGQNLNTPEGETLNGKHQTDSIVCEMKMDTDQNTRENLTGINSTVEEPVSPMLPPSAVEEREAVSKTALASPPATMAANESQEIDEDEGIHSHEGSDLSDNMSEGSDDSGLHGARPVPQESSRKNAKEALAVKAAKGDFVCIFCDRSFRKGKDYSKHLNRHLVNVYYLEEAAQGQE

SEQ ID NO: 303 - protein, 117 aa, Homo sapiens [sequence omitted]

SEQ ID NO: 304 - protein, 288 aa, Homo sapiens [sequence omitted]

SEQ ID NO: 305 - protein, 97 aa, Homo sapiens
MPSQMEHAMETMMFTFHKFAGDKGYLTKEDLRVLMEKEFPGFLENQKDPLAVDKIMKDLDQCRDGKVGFQSFFSLIAGLTIACNDYFVVHMKQKGKK

SEQ ID NO: 306 - protein, 95 aa, Homo sapiens
MTELETAMGMIIDVFSRYSGSEGSTQTLTKGELKVLMEKELPGFLQSGKDKDAVDKLLKDLDANGDAQVDFSEFIVFVAAITSACHKYFEKAGLK

SEQ ID NO: 307 - protein, 547 aa, Homo sapiens
MSSSPWEPATLRRVFVVGVGMTKFVKPGAENSRDYPDLAEEAGKKALADAQIPYSAVDQACVGYVFGDSTCGQRAIYHSLGMTGIPIINVNNNCATGSTALFMARQLIQGGVAECVLALGFEKMSKGSLGIKFSDRTIPTDKHVDLLINKYGLSAHPVAPQMFGYAGKEHMEKYGTKIEHFAKIGWKNHKHSVNNPYSQFQDEYSLDEVMASKEVFDFLTILQCCPTSDGAAAAILASEAFVQKYGLQSKAVEILAQEMMTDLPSSFEEKSIIKMVGFDMSKEAARKCYEKSGLTPNDIDVIELHDCFSTNELLTYEALGLCPEGQGATLVDRGDNTYGGKWVINPSGGLISKGHPLGATGLAQCAELCWQLRGEAGKRQVPGAKVALQHNLGIGGAVVVTLYKMGFPEAASSFRTHQIEAVPTSSASDGFKANLVFKEIEKKLEEEGEQFVKKIGGIFAFKVKDGPGGKEATWVVDVKNGKGSVLPNSDKKADCTITMADSDFLALMTGKMNPQSAFFQGKLKITGNMGLAMKLQNLQLQPGNAKL

SEQ ID NO: 308 - protein, 286 aa, Homo sapiens
MHGNVNPNAAGQLPTSPGHMHTQVPPYPQPQPYQPAQPYPFGTGGSAMYRPQQPVAPPTSNAYPNTPYISSASSYTGQSQLYAAQHQASSPTSSPATSFPPPPSSGASFQHGGPGAPPSSSAYALPPGTTGTLPAASELPASQRTENQSIQDQAPMLEGPQNGWNDPPALNRVPKKKKMPENFMPPVPITSPIMNPLGDPQSQMLQQQPSAPVPLSSQSSFPQPHLPGGQPFHGVQQPLGQTGMPPFQSPILKVPQGLLLEIPSSMCSLCQQKKLPRNLFQMSTSF

SEQ ID NO: 309 - protein, 833 aa, Homo sapiens
MAPHWAVWLLAARLWGLGIGAEVWWNLVPRKTVSSGELATVVRRFSQTGIQDFLTLTLTEPTGLLYVGAREALFAFSMEALELQGAISWEAPVEKKTECIQKGKNNQTECFNFIRFLQPYNASHLYVCGTYAFQPKCTYVNMLTFTLEHGEFEDGKGKCPYDPAKGHAGLLVDGELYSATLNNFLGTEPIILRNMGPHHSMKTEYLAFWLNEPHFVGSAYVPESVGSFTGDDDKVYFFFRERAVESDCYAEQVVARVARVCKGDMGGARTLQRKWTTFLKARLACSAPNWQLYFNQLQAMHTLQDTSWHNTTFFGVFQAQWGDMYLSAICEYQLEEIQRVFEGPYKEYHEEAQKWDRYTDPVPSPRPGSCINNWHRRHGYTSSLELPDNILNFVKKHPLMEEQVGPRWSRPLLVKKGTNFTHLVADRVTGLDGATYTVLFIGTGDGWLLKAVSLGPWVHLIEELQLFDQEPMRSLVLSQSKKLLFAGSRSQLVQLPVADCMKYRSCADCVLARDPYCAWSVNTSRCVAVGGHSGSLLIQHVMTSDTSGICNLRGSKKVRPTPKNITVVAGTDLVLPCHLSSNLAHARWTFGGRDLPAEQPGSFLYDARLQALVVMAAQPRHAGAYHCFSEEQGARLAAEGYLVAVVAGPSVTLEARAPLENLGLVWLAVVALGAVCLVLLLLVLSLRRRLREELEKGAKATERTLVYPLELPKEPTSPPFRPCPEPDEKLWDPVGYYYSDGSLKIVPGHARCQPGGGPPSPPPGIPGQPLPSPTRLHLGGGRNSNANGYVRLQLGGEDRGGLGHPLPELADELRRKLQQRQPLPDSNPEESSV

SEQ ID NO: 310 - protein, 402 aa, Homo sapiens [sequence omitted]

SEQ ID NO: 311 - protein, 832 aa, Homo sapiens
MRGCLRLALLCALPWLLLAASPGHPAKSPRQPPAPRRDPFDAARGADFDHVYSGVVNLSTENIYSFNYTSQPDQVTAVRVYVNSSSENLNYPVLVVVRQQKEVLSWQVPLLFQGLYQRSYNYQEVSRTLCPSEATNETGPLQQLIFVDVASMAPLGAQYKLLVTKLKHFQLRTNVAFHFTASPSQPQYFLYKFPKDVDSVIIKVVSEMAYPCSVVSVQNIMCPVYDLDHNVEFNGVYQSMTKKAAITLQKKDFPGEQFFVVFVIKPEDYACGGSFFIQEKENQTWNLQRKKNLEVTIVPSIKESVYVKSSLFSVFIFLSFYLGCLLVGFVHYLRFQRKSIDGSFGSNDGSGNMVASHPIAASTPEGSNYGTIDESSSSPGRQMSSSDGGPPGQSDTDSSVEESDFDTMPDIESDKNIIRTKMFLYLSDLSRKDRRIVSKKYKIYFWNIITIAVFYALPVIQLVITYQTVVNVTGNQDICYYNFLCAHPLGVLSAFNNILSNLGHVLLGFLFLLIVLRRDILHRRALEAKDIFAVEYGIPKHFGLFYAMGIALMMEGVLSACYHVCPNYSNFQFDTSFMYMIAGLCMLKLYQTRHPDINASAYSAYASFAVVIMVTVLGVVFGKNDVWFWVIFSAIHVLASLALSTQIYYMGRFKIDVSDTDLGIFRRAAMVFYTDCIQQCSRPLYMDRMVLLVVGNLVNWSFALFGLIYRPRDFASYMLGIFICNLLLYLAFYIIMKLRSSEKVLPVPLFCIVATAVMWAAALYFFFQNLSSWEGTPAESREKNRECILLDFFDDHDIWHFLSATALFFSFLVLLTLDDDLDVVRRDQIPVF

SEQ ID NO: 312 - protein, 337 aa, Homo sapiens
MAAPRDNVTLLFKLYCLAVMTLMAAVYTIALRYTRTSDKELYFSTTAVCITEVIKLLLSVGILAKETGSLGRFKASLRENVLGSPKELLKLSVPSLVYAVQNNMAFLALSNLDAAVYQVTYQLKIPCTALCTVLMLNRTLSKLQWVSVFMLCAGVTLVQWKPAQATKVVVEQNPLLGFGAIAIAVLCSGFAGVYFEKVLKSSDTSLWVRNIQMYLSGIIVTLAGVYLSDGAEIKEKGFFYGYTYYVWFVIFLASVGGLYTSVVVKYTDNIMKGFSAAAAIVLSTIASVMLFGLQITLTFALGTLLVCVSIYLYGLPRQDTTSIQQGETASKERVIGV

SEQ ID NO: 313 - protein, 364 aa, Homo sapiens
MNRAPLKRSRILHMALTGASDPSAEAEANGEKPFLLRALQIALVVSLYWVTSISMVFLNKYLLDSPSLRLDTPIFVTFYQCLVTTLLCKGLSALAACCPGAVDFPSLRLDLRVARSVLPLSVVFIGMITFNNLCLKYVGVAFYNVGRSLTTVFNVLLSYLLLKQTTSFYALLTCGIIIGGFWLGVDQEGAEGTLSWLGTVFGVLASLCVSLNAIYTTKVLPAVDGSIWRLTFYNNVNACILFLPLLLLLGELQALRDFAQLGSAHFWGMMTLGGLFGFAIGYVTGLQIKFTSPLTHNVSGTAKACAQTVLAVLYYEETKSFLWWTSNMMVLGGSSAYTWVRGWEMKKTPEEPSPKDSEKSAMGV

SEQ ID NO: 314 - protein, 755 aa, Homo sapiens
MARKLSVILILTFALSVTNPLHELKAAAFPQTTEKISPNWESGINVDLAISTRQYHLQQLFYRYGENNSLSVEGFRKLLQNIGIDKIKRIHIHHDHDHHSDHEHHSDHERHSDHEHHSEHEHHSDHDHHSHHNHAASGKNKRKALCPDHDSDSSGKDPRNSQGKGAHRPEHASGRRNVKDSVSASEVTSTVYNTVSEGTHFLETIETPRPGKLFPKDVSSSTPPSVTSKSRVSRLAGRKTNESVSEPRKGFMYSRNTNENPQECFNASKLLTSHGMGIQVPLNATEFNYLCPAIINQIDARSCLIHTSEKKAEIPPKTYSLQIAWVGGFIAISIISFLSLLGVILVPLMNRVFFKFLLSFLVALAVGTLSGDAFLHLLPHSHASHHHSHSHEEPAMEMKRGPLFSHLSSQNIEESAYFDSTWKGLTALGGLYFMFLVEHVLTLIKQFKDKKKKNQKKPENDDDVEIKKQLSKYESQLSTNEEKVDTDDRTEGYLRADSQEPSHFDSQQPAVLEEEEVMIAHAHPQEVYNEYVPRGCKNKCHSHFHDTLGQSDDLIHHHHDYHHILHHHHHQNHHPHSHSQRYSREELKDAGVATLAWMVIMGDGLHNFSDGLAIGAAFTEGLSSGLSTSVAVFCHELPHELGDFAVLLKAGMTVKQAVLYNALSAMLAYLGMATGIFIGHYAENVSMWIFALTAGLFMYVALVDMVPEMLHNDASDHGCSRWGYFFLQNAGMLLGFGIMLLISIFEHKIVFRINF

SEQ ID NO: 315 - protein, 1214 aa, Homo sapiens
MERFRLEKKLPGPDEEAVVDLGKTSSTVNTKFEKEELESHRAVYIGVHVPFSKESRRRHRHRGHKHHHRRRKDKESDKEDGRESPSYDTPSQRVQFILGTEDDDEEHIPHDLFTEMDELCYRDGEEYEWKETARWLKFEEDVEDGGDRWSKPYVATLSLHSLFELRSCILNGTVMLDMRASTLDEIADMVLDNMIASGQLDESIRENVREALLKRHHHQNEKRFTSRIPLVRSFADIGKKHSDPHLLERNGEGLSASRHSLRTGLSASNLSLRGESPLSLLLGHLLPSSRAGTPAGSRCTTPVPTPQNSPPSSPSISRLTSRSSQESQRQAPELLVSPASDDIPTVVIHPPEEDLEAALKGEEQKNEENVDLTPGILASPQSAPGNLDNSKSGEIKGNGSGGSRENSTVDFSKVDMNFMRKIPTGAEASNVLVGEVDFLERPIIAFVRLAPAVLLTGLTEVPVPTRFLFLLLGPAGKAPQYHEIGRSIATLMTDEIFHDVAYKAKDRNDLLSGIDEFLDQVTVLPPGEWDPSIRIEPPKSVPSQEKRKIPVFHNGSTPTLGETPKEAAHHAGPELQRTGRLFGGLILDIKRKAPFFLSDFKDALSLQCLASILFLYCACMSPVITFGGLLGEATEGRISAIESLFGASLTGIAYSLFAGQPLTILGSTGPVLVFEKILYKFCRDYQLSYLSLRTSIGLWTSFLCIVLVATDASSLVCYITRFTEEAFAALICIIFIYEALEKLFDLGETYAFNMHNNLDKLTSYSCVCTEPPNPSNETLAQWKKDNITAHNISWRNLTVSECKKLRGVFLGSACGHHGPYIPDVLFWCVILFFTTFFLSSFLKQFKTKRYFPTKVRSTISDFAVFLTIVIMVTIDYLVGVPSPKLHVPEKFEPTHPERGWIISPLGDNPWWTLLIAAIPALLCTILIFMDQQITAVIINRKEHKLKKGAGYHLDLLMVGVMLGVCSVMGLPWFVAATVLSISHVNSLKVESECSAPGEQPKFLGIREQRVTGLMIFILMGLSVFMTSVLKFIPMPVLYGVFLYMGVSSLKGIQLFDRIKLFGMPAKHQPDLIYLRYVPLWKVHIFTVIQLTCLVLLWVIKVSAAAVVFPMMVLALVFVRKLMDLCFTKRELSWLDDLMPESKKKKEDDKKKKEKEEAERMLQDDDDTVHLPFEGGSLLQIPVKALKYSPDKPVSVKISFEDEPRKKYVDAETSL

SEQ ID NO: 316 - protein, 507 aa, Homo sapiens
MAGAGPKRRALAAPAAEEKEEAREKMLAAKSADGSAPAGEGEGVTLQRNITLLNGVAIIVGTIIGSGIFVTPTGVLKEAGSPGLALVVWAACGVFSIVGALCYAELGTTISKSGGDYAYMLEVYGSLPAFLKLWIELLIIRPSSQYIVALVFATYLLKPLFPTCPVPEEAAKLVACLCVLLLTAVNCYSVKAATRVQDAFAAAKLLALALIILLGFVQIGKGDVSNLDPNFSFEGTKLDVGNIVLALYSGLFAYGGWNYLNFVTEEMINPYRNLPLAIIISLPIVTLVYVLTNLAYFTTLSTEQMLSSEAVAVDFGNYHLGVMSWIIPVFVGLSCFGSVNGSLFTSSRLFFVGSREGHLPSILSMIHPQLLTPVPSLVFTCVMTLLYAFSKDIFSVINFFSFFNWLCVALAIIGMIWLRHRKPELERPIKVNLALPVFFILACLFLIAVSFWKTPVECGIGFTIILSGLPVYFFGVWWKNKPKWLLQGIFSTTVLCQKLMQVVPQET

SEQ ID NO: 317 - protein, 486 aa, Homo sapiens
MLNSKHSLSTHRSPTGEKAKAGSRFGATSWCQSHLHTAWSKGIARVPWIQFLPEASSPRAPPSHSQQEEAAMNMKDVPEPCGRGAPAGGAGRATDKEAGPAAGLEAPRSGGSGAAWGPHLWAAAAAETHGQAKAKSGWLKPYYFIELMESRKDITNQEELWKMKPRRNLEEDDYLHKDTGETSMLKRPVLLHLHQTAHADEFDCPSELQHTQELFPQWHLPIKIAAIIASLTFLYTLLREVIHPLATSHQQYFYKIPILVINKVLPMVSITLLALVYLPGVIAAIVQLHNGTKYKKFPHWLDKWMLTRKQFGLLSFFFAVLHAIYSLSYPMRRSYRYKLLNWAYQQVQQNKEDAWIEHDVWRMEIYVSLGIVGLAILALLAVTSIPSVSDSLTWREFHYIQSKLGIVSLLLGTIHALIFAWNKWIDIKQFVWYTPPTFMIAVFLPIVVLIFKSILFLPCLRKKILKIRHGWEDVTKINKTEICSQL

SEQ ID NO: 318 - protein, 683 aa, Homo sapiens
MALFVRLLALALALALGPAATLAGPAKSPYQLVLQHSRLRGRQHGPNVCAVQKVIGTNRKYFTNCKQWYQRKICGKSTVISYECCPGYEKVPGEKGCPAALPLSNLYETLGVVGSTTTQLYTDRTEKLRPEMEGPGSFTIFAPSNEAWASLPAEVLDSLVSNVNIELLNALRYHMVGRRVLTDELKHGMTLTSMYQNSNIQIHHYPNGIVTVNCARLLKADHHATNGVVHLIDKVISTITNNIQQIIEIEDTFETLRAAVAASGLNTMLEGNGQYTLLAPTNEAFEKIPSETLNRILGDPEALRDLLNNHILKSAMCAEAIVAGLSVETLEGTTLEVGCSGDMLTINGKAIISNKDILATNGVIHYIDELLIPDSAKTLFELAAESDVSTAIDLFRQAGLGNHLSGSERLTLLAPLNSVFKDGTPPIDAHTRNLLRNHIIKDQLASKYLYHGQTLETLGGKKLRVFVYRNSLCIENSCIAAHDKRGRYGTLFTMDRVLTPPMGTVMDVLKGDNRFSMLVAAIQSAGLTETLNREGVYTVFAPTNEAFRALPPRERSRLLGDAKELANILKYHIGDEILVSGGIGALVRLKSLQGDKLEVSLKNNVVSVNKEPVAEPDIMATNGVVHVITNVLQPPANRPQERGDELADSALEIFKQASAFSRASQRSVRLAPVYQKLLERMKH

SEQ ID NO: 319 - protein, 247 aa, Homo sapiens
MAGGVLPLRGLRALCRVLLFLSQFCILSGGEQSQALAQSIKDPGPTRTFTVVPRAAESTEIPPYVMKCPSNGLCSRLPADCIDCTTNFSCTYGKPVTFDCAVKPSVTCVDQDFKSQKNFIINMTCRFCWQLPETDYECTNSTSCMTVSCPRQRYPANCTVRDHVHCLGNRTFPKMLYCNWTGGYKWSTALALSITLGGFGADRFYLGQWREGLGKLFSFGGLGIWTLIDVLLIGVGYVGPADGSLYI

SEQ ID NO: 320 - protein, 192 aa, Homo sapiens
MSLMPKMHLLFPLTLVRSFWSDMMDSAQSFITSSWTFYLQADDGKIVIFQSKPEIQYAPHLEQEPTNLRESSLSKMSYLQMRNSQAHRNFLEDGESDGFLRCLSLNSGWILTTTLVLSVMVLLWICCATVATAVEQYVPSEKLSIYGDLEFMNEQKLNRYPASSLVVVRSKTEDHEEAGPLPTKVNLAHSEI

SEQ ID NO: 321 - protein, 339 aa, Homo sapiens
MAAACGPGAAGYCLLLGLHLFLLTAGPALGWNDPDRMLLRDVKALTLHYDRYTTSRRLDPIPQLKCVGGTAGCDSYTPKVIQCQNKGWDGYDVQWECKTDLDIAYKFGKTVVSCEGYESSEDQYVLRGSCGLEYNLDYTELGLQKLKESGKQHGFASFSDYYYKWSSADSCNMSGLITIVVLLGIAFVVYKLFLSDGQYSPPPYSEYPPFSHRYQRFTNSAGPPPPGFKSEFTGPQNTGHGATSGFGSAFTGQQGYENSGPGFWTGLGTGGILGYLFGSNRAATPFSDSWYYPSYPPSYPGTWNRAYSPLHGGSGSYSVCSNSDTKTRTASGYGGTRRR

SEQ ID NO: 322 - protein, 1847 aa, Homo sapiens
MEGHGKTPPPGEESKQEKEQEREEQLMEDKKRKKEDKKKKEATQKVTEQKTKVPEVTKPSLSQPTAASPIGSSPSPPVNGGNNAKRVAVPNGQPPSAARYMPREVPPRFRCQQDHKVLLKRGQPPPPSCMLLGGGAGPPPCTAPGANPNNAQVTGALLQSESGTAPDSTLGGAAASNYANSTWGSGASSNNGTSPNPIHIWDKVIVDGSDMEEWPCIASKDTESSSENTTDNNSASNPGSEKSTLPGSTTSNKGKGSQCQSASSGNECNLGVWKSDPKAKSVQSSNSTTENNNGLGNWRNVSGQDRIGPGSGFSNFNPNSNPSAWPALVQEGTSRKGALETDNSNSSAQVSTVGQTSREQQSKMENAGVNFVVSGREQAQIHNTDGPKNGNTNSLNLSSPNPMENKGMPFGMGLGNTSRSTDAPSQSTGDRKTGSVGSWGAARGPSGTDTVSGQSNSGNNGNNGKEREDSWKGASVQKSTGSKNDSWDNNNRSTGGSWNFGPQDSNDNKWGEGNKMTSGVSQGEWKQPTGSDELKIGEWSGPNQPNSSTGAWDNQKGHPLPENQGNAQAPCWGRSSSSTGSEVGGQSTGSNHKAGSSDSHNSGRRSYRPTHPDCQAVLQTLLSRTDLDPRVLSNTGWGQTQIKQDTVWDIEEVPRPEGKSDKGTEGWESAATQTKNSGGWGDAPSQSNQMKSGWGELSASTEWKDPKNTGGWNDYKNNNSSNWGGGRPDEKTPSSWNENPSKDQGWGGGRQPNQGWSSGKNGWGEEVDQTKNSNWESSASKPVSGWGEGGQNEIGTWGNGGNASLASKGGWEDCKRSPAWNETGRQPNSWNKQHQQQQPPQQPPPPQPEASGSWGGPPPPPPGNVRPSNSSWSSGPQPATPKDEEPSGWEEPSPQSISRKMDIDDGTSAWGDPNSYNYKNVNLWDKNSQGGPAPREPNLPTPMTSKSASVWSKSTPPAPDNGTSAWGEPNESSPGWGEMDDTGASTTGWGNTPANAPNAMKPNSKSMQDGWGESDGPVTGARHPSWEEEEDGGVWNTTGSQGSASSHNSASWGQGGKKQMKCSLKGGNNDSWMNPLAKQFSNMGLLSQTEDNPSSKMDLSVGSLSDKKFDVDKRAMNLGDFNDIMRKDRSGFRPPNSKDMGTTDSGPYFEKLTLPFSNQDGCLGDEAPCSPFSPSPSYKLSPSGSTLPNVSLGAIGTGLNPQNFAARQGGSHGLFGNSTAQSRGLHTPVQPLNSSPSLRAQVPPQFISPQVSASMLKQFPNSGLSPGLFNVGPQLSPQQIAMLSQLPQIPQFQLACQLLLQQQQQQQLLQNQRKISQAVRQQQEQQLARMVSALQQQQQQQQRQPGMKHSPSHPVGPKPHLDNMVPNALNVGLPDLQTKGPIPGYGSGFSSGGMDYGMVGGKEAGTESRFKQWTSMMEGLPSVATQEANMHKNGAIVAPGKTRGGSPYNQFDIIPGDTLGGHTGPAGDSWLPAKSPPTNKIGSKSSNASWPPEFQPGVPWKGIQNIDPESDPYVTPGSVLGGTATSPIVDTDHQLLRDNTTGSNSSLNTSLPSPGAWPYSASDNSFTNVHSTSAKFPDYKSTWSPDPIGHNPTHLSNKMWKNHISSRNTTPLPRPPPGLTNPKPSSPWSSTAPRSVRGWGTQDSRLASASTWSDGGSVRPSYWLVLHNLTPQIDGSTLRTICMQHGPLLTFHLNLTQGTALIRYSTKQEAAKAQTALHMCVLGNTTILAEFATDDEVSRFLAQAQPPTPAATPSAPAAGWQSLETGQNQSDPVGPALNLFGGSTGLGQWSSSAGGSSGADLAGASLWGPPNYSSSLWGVPTVEDPHRMGSPAPLLPGDLLGGGSDSI

SEQ ID NO: 323 - protein, 138 aa, Homo sapiens
MVSRTEGNIDDSLIGGNASAEGPEGEGTESTVITGVDIVMNHHLQETSFTKEAYKKYIKDYMKSIKGKLEEQRPERVKPFMTGAAEQIKHILANFKNYQFFIGENMNPDGMVALLDYREDGVTPYMIFFKDGLEMEKC

SEQ ID NO: 324 - protein, 282 aa, Homo sapiens
MSDVEENNFEGRESRSQSKSPTGTPARVKSESRSGSRSPSRVSKHSESHSRSRSKSRSRSRRHSHRRYTRSRSHSHSHRRRSRSRSYTPEYRRRRSRSHSPMSNRRRHTGSRANPDPNTCLGVFGLSLYTTERDLREVFSRYGPLSGVNVVYDQRTGRSRGFAFVYFERIDDSKEAMERANGMELDGRRIRVDYSITKRAHTPTPGIYMGRPTHSGGGGGGGGGGGGGGGGRRRDSYYDRGYDRGYDRYEDYDYRYRRRSPSPYYSRYRSRSRSRSYSPRRY

SEQ ID NO: 325 - protein, 358 aa, Homo sapiens
MRATPLAAPAGSLSRKKRLELDDNLDTERPVQKRARSGPQPRLPPCLLPLSPPTAPDRATAVATASRLGPYVLLEPEEGGRAYQALHCPTGTEYTCKVYPVQEALAVLEPYARLPPHKHVARPTEVLAGTQLLYAFFTRTHGDMHSLVRSRHRIPEPEAAVLFRQMATALAHCHQHGLVLRDLKLCRFVFADRERKKLVLENLEDSCVLTGPDDSLWDKHACPAYVGPEILSSRASYSGKAADVWSLGVALFTMLAGHYPFQDSEPVLLFGKIRRGAYALPAGLSAPARCLVRCLLRREPAERLTATGILLHPWLRQDPMPLAPTRSHLWEAAQVVPDGLGLDEAREEEGDREVVLYG

SEQ ID NO: 326 - protein, 294 aa, Homo sapiens
MPRGDSEQVRYCARFSYLWLKFSLIIYSTVFWLIGALVLSVGIYAEVERQKYKTLESAFLAPAIILILLGVVMFMVSFIGVLASLRDNLYLLQAFMYILGICLIMELIGGVVALTFRNQTIDFLNDNIRRGIENYYDDLDFKNIMDFVQKKFKCCGGEDYRDWSKNQYHDCSAPGPLACGVPYTCCIRNTTEVVNTMCGYKTIDKERFSVQDVIYVRGCTNAVIIWFMDNYTIMAGILLGILLPQFLGVLLTLLYITRVEDIIMEHSVTDGLLGPGAKPSVEAAGTGCCLCYPN

SEQ ID NO: 327 - protein, 669 aa, Homo sapiens
MDADKEKDLQKFLKNVDEISNLIQEMNSDDPVVQQKAVLETEKRLLLMEEDQEEDECRTTLNKTMISPPQTAMKSAEEINSEAFLASVEKDAKERAKRRRENKVLADALKEKGNEAFAEGNYETAILRYSEGLEKLKDMKVLYTNRAQAYMKLEDYEKALVDCEWALKCDEKCTKAYFHMGKANLALKNYSVSRECYKKILEINPKLQTQVKGYLNQVDLQEKADLQEKEAHELLDSGKNTAVTTKNLLETLSKPDQIPLFYAGGIEILTEMINECTEQTLFRMHNGFSIISDNEVIRRCFSTAGNDAVEEMVCVSVLKLWQAVCSRNEENQRVLVIHHDRARLLAALLSSKVLAIRQQSFALLLHLAQTESGRSLIINHLDLTRLLEALVSFLDFSDKEANTAMGLFTDLALEERFQVWFQANLPGVLPALTGVLKTDPKVSSSSALCQCIAIMGNLSAEPTTRRHMAACEEFGDGCLSLLARCEEDVDLFREVIYTLLGLMMNLCLQAPFVSEVWAVEVSRRCLSLLNSQDGGILTRAAGVLSRTLSSSLKIVEEALRAGVVKKMMKFLKTGGETASRYAIKILAICTNSYHEAREEVIRLDKRAPTPPLETRLVPGNQSLLVQQAEELGFSILKRMWPGWNSITILKPQQRWQNSLGPHPSGCVYQ

SEQ ID NO: 328 - protein, 87 aa, Homo sapiens
MGSGCRIECIFFSEFHPTLGPKITYQVPEDFISRELFDTVQVYIITKPELQNKLITVYGKEADRLSCVHRTQEVQPQCSPLQPGLRV

SEQ ID NO: 329 - protein, 1012 aa, Homo sapiens
MDALDASKLLDEELYSRQLYVLGSPAMQRIQGARVLVSGLQGLGAEVAKNLVLMGVGSLTLHDPHPTCWSDLAAQFLLSEQDLERSRAEASQELLAQLNRAVQVVVHTGDITEDLLLDFQVVVLTAAKLEEQLKVGTLCHKHGVCFLAADTRGLVGQLFCDFGEDFTVQDPTEAEPLTAAIQHISQGSPGILTLRKGANTHYFRDGDLVTFSGIEGMVELNDCDPRSIHVREDGSLEIGDTTTFSRYLRGGAITEVKRPKTVRHKSLDTALLQPHVVAQSSQEVHHAHCLHQAFCALHKFQHLHGRPPQPWDPVDAETVVGLARDLEPLKRTEEEPLEEPLDEALVRTVALSSAGVLSPMVAMLGAVAAQEVLKAISRKFMPLDQWLYFDALDCLPEDGELLPSPEDCALRGSRYDGQIAVFGAGFQEKLRRQHYLLVGAGAIGCELLKVFALVGLGAGNSGGLTVVDMDHIERSNLSRQFLFRSQDVGRPKAEVAAAAARGLNPDLQVIPLTYPLDPTTEHIYGDNFFSRVDGVAAALDSFQARRYVAARCTHYLKPLLEAGTSGTWGSATVFMPHVTEAYRAPASAAASEDAPYPVCTVRYFPSTAEHTLQWARHEFEELFRLSAETINHHQQAHTSLADMDEPQTLTLLKPVLGVLRVRPQNWQDCVAWALGHWKLCFHYGIKQLLRHFPPNKVLEDGTPFWSGPKQCPQPLEFDTNQDTHLLYVLAAANLYAQMHGLPGSQDWTALRELLKLLPQPDPQQMAPIFASNLELASASAEFGPEQQKELNKALEVWSVGPPLKPLMFEKDDDSNFHVDFVVAAASLRCQNYGIPPVNRAQSKRIVGQIIPAIATTTAAVAGLLGLELYKVVSGPRPRSAFRHSYLHLAENYLIRYMPFAPAIQTFHHLKWTSWDRLKVPAGQPERTLESLLAHLQEQHGLRVRILLHGSALLYAAGWSPEKQAQHLPLRVTELVQQLTGQAPAPGQRVLVLELSCEGDDEDTAFPPLHYEL

SEQ ID NO: 330 - protein, 152 aa, Homo sapiens
MSTPARRRLMRDFKRLQEDPPAGVSGAPSENNIMVWNAVIFGPEGTPFEDGTFKLTIEFTEEYPNKPPTVRFVSKMFHPNVYADGSICLDILQNRWSPTYDVSSILTSIQSLLDEPNPNSPANSQAAQLYQENKREYEKRVSAIVEQSWRDC

SEQ ID NO: 331 - protein, 727 aa, Homo sapiens
MNGEADCPTDLEMAAPKGQDRWSQEDMLTLLECMKNNLPSNDSSKFKTTESHMDWEKVAFKDFSGDMCKLKWVEISNEVRKFRTLTELILDAQEHVKNPYKGKKLKKHPDFPKKPLTPYFRFFMEKRAKYAKLHPEMSNLDLTKILSKKYKELPEKKKMKYIQDFQREKQEFERNLARFREDHPDLIQNAKKSDIPEKPKTPQQLWYTHEKKVYLKVRPDEIMRDYIQKHPELNISEEGITKSTLTKAERQLKDKFDGRPTKPPPNSYSLYCAELMANMKDVPSTERMVLCSQQWKLLSQKEKDAYHKKCDQKKKDYEVELLRFLESLPEEEQQRVLGEEKMLNINKKQATSPASKKPAQEGGKGGSEKPKRPVSAMFIFSEEKRRQLQEERPELSESELTRLLARMWNDLSEKKKAKYKAREAALKAQSERKPGGEREERGKLPESPKRAEEIWQQSVIGDYLARFKNDRVKALKAMEMTWNNMEKKEKLMWIKKAAEDQKRYERELSEMRAPPAATNSSKKMKFQGEPKKPPMNGYQKFSQELLSNGELNHLPLKERMVEIGSRWQRISQSQKEHYKKLAEEQQKQYKVHLDLWVKSLSPQDRAAYKEYISNKRKSMTKLRGPNPKSSRTTLQSKSESEEDDEEDEDDEDEDEEEEDDENGDSSEDGGDSSESSSEDESEDGDENEEDDEDEDDDEDDDEDEDNESEGSSSSSSSSGDSSDSDSN

SEQ ID NO: 332 - protein, 309 aa, Homo sapiens
MVGFKATDVPPTATVKFLGAGTAACIADLITFPLDTAKVRLQIQGESQGPVRATASAQYRGVMGTILTMVRTEGPRSLYNGLVAGLQRQMSFASVRIGLYDSVKQFYTKGSEHASIGSRLLAGSTTGALAVAVAQPTDVVKVRFQAQARAGGGRRYQSTVNAYKTIAREEGFRGLWKGTSPNVARNAIVNCAELVTYDLIKDALLKANLMTDDLPCHFTSAFGAGFCTTVIASPVDVVKTRYMNSALGQYSSAGHCALTMLQKEGPRAFYKGFMPSFLRLGSWNVVMFVTYEQLKRALMAACTSREAPF

SEQ ID NO: 333 - protein, 284 aa, Homo sapiens
MCNTPTYCDLGKAAKDVFNKGYGFGMVKIDLKTKSCSGVMEFSTSGHAYTDTGKASGNLETKYKVCNYGLTFTQKWNTDNTLGTEISWENKLAEGLKLTLDTIFVPNTGKKSGKLKASYKRDCFSVGSNVDIDFSGPTIYGWAVLAFEGWLAGYQMSFDTAKSKLSQNNFALGYKAADFQLHTHVNDGTEFGGSIYQKVNEKIETSINLAWTAGSNNTRFGIAAKYMLDCRTSLSAKVNNASLIGLGYTQTLRPGVKLTLSALIDGKNFSAGGHKVGLGFELEA

SEQ ID NO: 334 - protein, 1427 aa, Homo sapiens
MLESYVTPILMSYVNRYIKNLKPSDLQLSLWGGDVVLSKLELKLDVLEQELKLPFTFLSGHIHELRIHVPWTKLGSEPVVITINTMECILKLKDGIQDDHESCGSNSTNRSTAESTKSSIKPRRMQQAAPTDPDLPPGYVQSLIRRVVNNVNIVINNLILKYVEDDIVLSVNITSAECYTVGELWDRAFMDISATDLVLRKVINFSDCTVCLDKRNASGKIEFYQDPLLYKCSFRTRLHFTYENLNSKMPSVIKIHTLVESLKLSITDQQLPMFIRIMQLGIALYYGEIGNFKEGEIEDLTCHNKDMLGNITGSEDETRIDMQYPAQHKGQELYSQQDEEQPQGWVSWAWSFVPAIVSYDDGEEDFVGNDPASTMHQQKAQTLKDPIVSIGFYCTKATVTFKLTEMQVESSYYSPQKVKSKEVLCWEQEGTTVEALMMGEPFFDCQIGFVGCRAMCLKGIMGVKDFEENMNRSETEACFFICGDNLSTKGFTYLTNSLFDYRSPENNGTRAEFILDSTHHKETYTEIAGMQRFGAFYMDYLYTMENTSGKGSTNQQDFSSGKSEDLGTVQEKSTKSLVIGPLDFRLDSSAVHRILKMIVCALEHEYEPYSRLKSDIKDENETILNPEEVALLEEYIPTRHTSVTLLKCTCTISMAEFNLLDHLLPVIMGEKNSSNFMNTTNFQSLRPLPSIRILVDKINLEHSVPMYAEQLVHVVSSLTQPSDNLLHYCYVHCYLKIFGFQAGLTSLDCSGSYCLPVPVIPSFSTALYGKLLKLPTCWTKRSQIAITEGIFELPNLTIQATRAQTLLLQAIYQSWSHLGNVSSSAVIEALINEIFLSIGVKSKNPLPTLEGSIQNVELKYCSTSLVKCASGTMGSIKICAKAPVDSGKEKLIPLLQGPSDTKDLHSTKWLNESRKPESLLAPDLMAFTIQVPQYIDYCHNSGAVLLCSIQGLAVNIDPILYTWLIYQPQKRTSRHMQQQPVVAVPLVMPVCRRKEDEVSIGSAPLAKQQSYQASEYASSPVKTKTVTESRPLSVPVKAMLNISESCRSPEERMKEFIGIVWNAVKHLTLQLEVQSCCVFIPNDSLPSPSTIVSGDIPGTVRSWYHGQTSMPGTLVLCLPQIKIISAGHKYMEPLQEIPFVIPRPILEEGDAFPWTISLHNFSIYTLLGKQVTLCLVEPMGCTSTLAVTSQKLLATGPDTRHSFVVCLHVDLESLEIKCSNPQVQLFYELTDIMNKVWNKIQKRGNLNLSPTSPETMAGPVPTSPVRSSIGTAPPDTSTCSPSADIGTTTEGDSIQAGEESPFSDSVTLEQTTSNIGGTSGRVSLWMQWVLPKITIKLFAPDPENKGTEVCMVSELEDLSASIDVQDVYTKVKCKIESFNIDHYRSRPGEGWQSGHFEGVFLQCKEKSVPWGRVLVFGAMWRCLPFLY

SEQ ID NO: 335 - protein, 1437 aa, Homo sapiens
MDFSFSFMQGIMGNTIQQPPQLIDSANIRQEDAFDNNSDIAEDGGQTPYEATLQQGFQYPATTEDLPPLTNGYPSSISVYETQTKYQSYNQYPNGSANGFGAVRNFSPTDYYHSEIPNTRPHEILEKPSPPQPPPPPSVPQTVIPKKTGSPEIKLKITKTIQNGRELFESSLCGDLLNEVQASEHTKSKHESRKEKRKKSNKHDSSRSEERKSHKIPKLEPEEQNRPNERVDTVSEKPREEPVLKEEAPVQPILSSVPTTEVSTGVKFQVGDLVWSKVGTYPWWPCMVSSDPQLEVHTKINTRGAREYHVQFFSNQPERAWVHEKRVREYKGHKQYEELLAEATKQASNHSEKQKIRKPRPQRERAQWDIGIAHAEKALKMTREERIEQYTFIYIDKQPEEALSQAKKSVASKTEVKKTRRPRSVLNTQPEQTNAGEVASSLSSTEIRRHSQRRHTSAEEEEPPPVKIAWKTAAARKSLPASITMHKGSLDLQKCNMSPVVKIEQVFALQNATGDGKFIDQFVYSTKGIGNKTEISVRGQDRLIISTPNQRNEKPTQSVSSPEATSGSTGSVEKKQQRRSIRTRSESEKSTEVVPKKKIKKEQVETVPQATVKTGLQKGASEISDSCKPLKKRSRASTDVEMTSSAYRDTSDSDSRGLSDLQVGFGKQVDSPSATADADVSDVQSMDSSLSRRGTGMSKKDTVCQICESSGDSLIPCEGECCKHFHLECLGLASLPDSKFICMECKTGQHPCFSCKVSGKDVKRCSVGACGKFYHEACVRKFPTAIFESKGFRCPQHCCSACSMEKDIHKASKGRMMRCLRCPVAYHSGDACIAAGSMLVSSYILICSNHSKRSSNSSAVNVGFCFVCARGLIVQDHSDPMFSSYAYKSHYLLNESNRAELMKLPMIPSSSASKKKCEKGGRLLCCESCPASFHPECLSIEMPEGCWNCNDCKAGKKLHYKQIVWVKLGNYRWWPAEICNPRSVPLNIQGLKHDLGDFPVFFFGSHDYYWVHQGRVFPYVEGDKSFAEGQTSINKTFKKALEEAAKRFQELKAQRESKEALEIEKNSRKPPPYKHIKANKVIGKVQIQVADLSEIPRCNCKPADENPCGLESECLNRMLQYECHPQVCPAGDRCQNQCFTKRLYPDAEIIKTERRGWGLRTKRSIKKGEFVNEYVGELIDEEECRLRIKRAHENSVTNFYMLTVTKDRIIDAGPKGNYSRFMNHSCNPNCETQKWTVNGDVRVGLFALCDIPAGMELTFNYNLDCLGNGRTECHCGADNCSGFLGVRPKSACASTNEEKAKNAKLKQKRRKIKTEPKQMHEDYCFQCGDGGELVMCDKKDCPKAYHLLCLNLTQPPYGKWECPWHQCDECSSAAVSFCEFCPHSFCKDHEKGALVPSALEGRLCCSEHDPMAPVSPEYWSKIKCKWESQDHGEEVKE

SEQ ID NO: 336 - protein, 293 aa, Homo sapiens
MAYHSGYGAHGSKHRARAAPDPPPLFDDTSGGYSSQPGGYPATGADVAFSVNHLLGDPMANVAMAYGSSIASHGKDMVHKELHRFVSVSKLKYFFAVDTAYVAKKLGLLVFPYTHQNWEVQYSRDAPLPPRQDLNAPDLYIPTMAFITYVLLAGMALGIQKRFSPEVLGLCASTALVWVVMEVLALLLGLYLATVRSDLSTFHLLAYSGYKYVGMILSVLTGLLFGSDGYYVALAWTSSALMYFIVRSLRTAALGPDSMGGPVPRQRLQLYLTLGAAAFQPLIIYWLTFHLVR

SEQ ID NO: 337 - protein, 497 aa, Homo sapiens
NTVMGRKKKKQLKPWCWYCNRDFDDEKILIQHQKAKHFKCHICHKKLYTGPGLAIHCMQVHKETIDAVPNAIPGRTDIELEIYGMEGIPEKDMDERRRLLEQKTQESQKKKQQDDSDEYDDDDSAASTSFQPQPVQPQQGYIPPMAQPGLPPVPGAPGMPPGIPPLMPGVPPLMPGMPPVMPGMPPGLHHQRKYTQSFCGENIMMPMGGMMPPGPGIPPLMPGMPPGMPPPVPRPGIPPMTQAQAVSAPGILNRPPAPTATVPAPQPPVTKPLFPSAGQMGTPVTSSSTASSNSESLSASSKALFPSTAQAQAAVQGPVGTDFKPLNSTPATTTEPPKPTFPAYTQSTASTTSTTNSTAAKPAASITSKPATLTTTSATSKLIHPDEDISLEERRAQLPKYQRNLPRPGQAPIGNPPVGPIGGMMPPQPGIPQQQGMRPPMPPHGQYGGHHQGMPGYLPGAMPPYGQGPPMVPPYQGGPPRPPMGMRPPVMSQGGRY

SEQ ID NO: 338 - protein, 513 aa, Homo sapiens
MASVLSRRLGKRSLLGARVLGPSASEGPSAAPPSEPLLEGAAPQPFTTSDDTPCQEQPKEVLKAPSTSGLQQVAFQPGQKVYVWYGGQECTGLVEQHSWMEGQVTVWLLEQKLQVCCRVEEVWLAELQGPCPQAPPLEPGAQALAYRPVSRNIDVPKRKSDAVEMDEMMAAMVLTSLSCSPVVQSPPGTEANFSASRAACDPWKESGDISDSGSSTTSGHWSGSSGVSTPSPPHPQASPKYLGDAFGSPQTDHGFETDPDPFLLDEPAPRKRKNSVKVMYKCLWPNCGKVLRSIVGIKRHVKALHLGDTVDSDQFKREEDFYYTEVQLKEESAAAAAAAAAGTPVPGTPTSEPAPTPSMTGLPLSALPPPLHKAQSSGPEHPGPESSLPSGALSKSAPGSFWHIQADHAYQALPSFQIPVSPHIYTSVSWAAAPSAACSLSPVRSRSLSFSEPQQPAPAMKSHLIVTSPPRAQSGARKARGEAKKCRKVYGIEHRDQWCTACRWKKACQRFLD

SEQ ID NO: 339 - DNA, 19 bp, Artificial
  sh-Fra-1(1)
taactagcctagaacacta

SEQ ID NO: 340 - DNA, 19 bp, Artificial
  sh-Fra-1(2)
gaagttccaccttgtgcca

SEQ ID NO: 341 - DNA, 19 bp, Artificial
  sh-Fra-1(1) 2
gtagatccttagaggtcct

SEQ ID NO: 342 - DNA, 19 bp, Artificial
  sh-Fra-1(2) 2
ggcctgtgcttgaacctga

SEQ ID NO: 343 - DNA, 19 bp, Artificial
  rat Fra-1 F
gcagacacagacagtccag

SEQ ID NO: 344 - DNA, 19 bp, Artificial
  rat Fra-1 R
ccatccactgcaattcctg

SEQ ID NO: 345 - DNA, 20 bp, Artificial
  rat HPRT1 F
ctggtgaaaaggacctctcg

SEQ ID NO: 346 - DNA, 26 bp, Artificial
  rat HPRT1 R
tgaagtgctcattatagtcaagggca

SEQ ID NO: 347 - DNA, 20 bp, Artificial
  human ABHD11 F
ttcaactccatcgccaagat

SEQ ID NO: 348 - DNA, 19 bp, Artificial
  human ABHD11 R
caccgtggttacgagcatc

SEQ ID NO: 349 - DNA, 18 bp, Artificial
  human ADORA2B F
tctgtgtcccgctcaggt

SEQ ID NO: 350 - DNA, 18 bp, Artificial
  human ADORA2B R
gatgccaaaggcaaggac

SEQ ID NO: 351 - DNA, 20 bp, Artificial
  human BIRC5 F
gcccagtgtttcttctgctt

SEQ ID NO: 352 - DNA, 20 bp, Artificial
  human BIRC5 R
ccggacgaatgctttttatg

SEQ ID NO: 353 - DNA, 18 bp, Artificial
  human CENPM F
aacacggccaccatcttg

SEQ ID NO: 354 - DNA, 19 bp, Artificial
  human CENPM R
gggactttgccaagtggac

SEQ ID NO: 355 - DNA, 20 bp, Artificial
  human CHAF1A F
ggagaggagagacgagcaga

SEQ ID NO: 356 - DNA, 19 bp, Artificial
  human CHAF1A R
cttgctcccgttcacattg

SEQ ID NO: 357 - DNA, 21 bp, Artificial
  human CHML F
ttatctcccaccaggttcctc

SEQ ID NO: 358 - DNA, 27 bp, Artificial
  human CHML R
ttctcttatttcttctttgaaggtgat

SEQ ID NO: 359 - DNA, 19 bp, Artificial
  human D21S2056E F
gcaaggctgggaagaaaga

SEQ ID NO: 360 - DNA, 20 bp, Artificial
  human D21S2056E R
gggtgcaggatctcagtcat

SEQ ID NO: 361 - DNA, 20 bp, Artificial
  human E2F1 F
tccaagaaccacatccagtg

SEQ ID NO: 362 - DNA, 18 bp, Artificial
  human E2F1 R
ctgggtcaacccctcaag

SEQ ID NO: 363 - DNA, 20 bp, Artificial
  human EZH2 F
tggtctcccctacagcagaa

SEQ ID NO: 364 - DNA, 26 bp, Artificial
  human EZH2 R
tcatctcccatataaggaatgttatg

SEQ ID NO: 365 - DNA, 19 bp, Artificial
  human FEN1 F
accccgaaccaagctttag

SEQ ID NO: 366 - DNA, 20 bp, Artificial
  human FEN1 R
gggccacatcagcaattagt

SEQ ID NO: 367 - DNA, 18 bp, Artificial
  human H2AFZ F
caccgtgggtccgattag

SEQ ID NO: 368 - DNA, 19 bp, Artificial
  human H2AFZ R
gtcctttccagccttaccg

SEQ ID NO: 369 - DNA, 18 bp, Artificial
  human IGFBP3 F
aacgctagtgccgtcagc

SEQ ID NO: 370 - DNA, 19 bp, Artificial
  human IGFBP3 R
cggtcttcctccgactcac

SEQ ID NO: 371 - DNA, 25 bp, Artificial
  human PAICS F
ttttcagttattacaggaagcaggt

SEQ ID NO: 372 - DNA, 20 bp, Artificial
  human PAICS R
tgaaagctgtctccccacat

SEQ ID NO: 373 - DNA, 22 bp, Artificial
  human PHLDA1 F
tctgcacaaaaactggtgagac

SEQ ID NO: 374 - DNA, 18 bp, Artificial
  human PHLDA1 R
actgctcagcctgccatc

SEQ ID NO: 375 - DNA, 22 bp, Artificial
  human PPP2R3A F
cagactccagaggtgatcaaga

SEQ ID NO: 376 - DNA, 20 bp, Artificial
  human PPP2R3A R
cggggactacttggagaggt

SEQ ID NO: 377 - DNA, 19 bp, Artificial
  human PTGES F
acgctgctggtcatcaaga

SEQ ID NO: 378 - DNA, 18 bp, Artificial
  human PTGES R
tcttccgcagcctcactt

SEQ ID NO: 379 - DNA, 22 bp, Artificial
  human PTP4A1 F
ggccacaatcttcaatgagtaa

SEQ ID NO: 380 - DNA, 18 bp, Artificial
  human PTP4A1 R
tgctgtgcctggcagtaa

SEQ ID NO: 381 - DNA, 18 bp, Artificial
  human SEC14L1 F
aggggctgagtggtgatg

SEQ ID NO: 382 - DNA, 23 bp, Artificial
  human SEC14L1 R
gtagtcggcatctagtttgtcgt

SEQ ID NO: 383 - DNA, 18 bp, Artificial
  human SFN F
cagagtccggcattggtc

SEQ ID NO: 384 - DNA, 18 bp, Artificial
  human SFN R
gctctggggacacacagg

SEQ ID NO: 385 - DNA, 19 bp, Artificial
  human SH3GL1 F
aggaggtggcagaaaccag

SEQ ID NO: 386 - DNA, 20 bp, Artificial
  human SH3GL1
tgactcacctgctcgatgtc

SEQ ID NO: 387 - DNA, 20 bp, Artificial
  human TJAP1 F
agagctgccgacaaacagac

SEQ ID NO: 388 - DNA, 20 bp, Artificial
  human TJAP1 R
agtcattctgggaggtgacg

SEQ ID NO: 389 - DNA, 20 bp, Artificial
  human TRFP F
ggaaccctgcgtttctactg

SEQ ID NO: 390 - DNA, 19 bp, Artificial
  human TRFP R
acaggcatctgggacacac

SEQ ID NO: 391 - DNA, 20 bp, Artificial
  human YTHDF1 F
cgacgactttgctcactacg

SEQ ID NO: 392 - DNA, 19 bp, Artificial
  human YTHDF1 R
ttcgactctgccgttcctt

1. A method for preventing, delaying and/or treating metastasis in a cancer patient comprising the administration of an inhibitor of a polypeptide, said polypeptide comprising an amino acid sequence that is encoded by a nucleotide sequence wherein the nucleotide sequence is selected from the groups consisting of:
(1) a nucleotide sequence encoding an enzyme PAICS, ABHD11, AURKB, CHML, EZH2, FEN1, IGFBP3, PCOLN3, PPP2R3A, PTGES, PTP4A1, and SCD,
(2) a nucleotide sequence encoding a transcription factor E2F1, FOSL1, and FOXM1,
(3) a nucleotide sequence encoding a structural protein C22orf18, CHAF1A, H2AFZ, SMTN, TJAP1, D21S2056E,
(4) a nucleotide sequence encoding a receptor ADORA2B;
(5) a nucleotide sequence encoding an adhesion molecule MTDH,
(6) a nucleotide sequence encoding an apoptose inhibitor BIRC5 and PHLDA1
(7) a nucleotide sequence encoding a protein involved in DNA replication/transcription MCM10, MCM2 and TRFP and
(8) a nucleotide sequence encoding a SEC14L1, SFN, SH3GL1 and YTHDF1.

2. A method according to claim 1, wherein the nucleotide sequence is selected from:
(a) a nucleotide sequence that has at least 60% identity with a sequence selected from SEQ ID NO: 19, 1, 2, 3, 4, 5, 6, 7, 8, 9, 10, 11, 12, 13, 14, 15, 16, 17, 18, 20, 21, 22, 23, 24, 25, 26, 27, 28, 29, 30, 31, 32; and,
(b) a nucleotide sequence that encodes an amino acid sequence that has at least 60% amino acid identity with an amino acid sequence encoded by a nucleotide sequence selected from SEQ ID NO; 19, 1, 2, 3, 4, 5, 6, 7, 8, 9, 10, 11, 12, 13, 14, 15, 16, 17, 18, 20, 21, 22, 23, 24, 25, 26, 27, 28, 29, 30, 31, 32.

3. A method inhibitor according to claim 1, wherein the inhibitor is a DNA or RNA molecule, a dominant negative, an inhibiting antibody raised against said polypeptide.

4. A method according to claim 3, wherein the DNA molecule is a nucleic acid construct which comprises a nucleotide sequence encoding an RNAi agent that is capable of inhibiting the expression of a polypeptide that comprises an amino acid sequence that is encoded by a nucleotide sequence selected from:
(a) a nucleotide sequence that has at least 60% identity with a sequence selected from SEQ ID NO: 1-32; and,
(b) a nucleotide sequence that encodes an amino acid sequence that has at least 60% amino acid identity with an amino acid sequence encoded by a nucleotide sequence selected from SEQ ID NO; 1-32;
and, wherein optionally the nucleotide sequence encoding the RNAi agent is operably linked to a promoter that is capable of driving expression of the nucleotide sequence in a cell.

5. A method according to claim 4, wherein in the nucleic acid construct the nucleotide sequence is selected from:
(a) a nucleotide sequence that has at least 60% identity with SEQ ID NO: 1, 2, 3, 7, 10, 11, 12, 15, 19, 20, 22, 23, 24, 25 and
(b) a nucleotide sequence that encodes an amino acid sequence that has at least 60% amino acid identity with an amino acid sequence encoded by the nucleotide sequence SEQ ID NO:1, 2, 3, 7, 10, 11, 12, 15, 19, 20, 22, 23, 24, 25.

6. Use of an inhibitor as defined in claim 1 for the manufacture of a medicament for preventing, delaying and/or treating metastasis in a cancer patient.

7. An inhibitor as defined in any one of claims 1 for preventing, delaying and/or treating metastasis in a cancer patient.

8. A method according to claim 1, wherein the method comprises the step of administering to the patient a therapeutically effective amount of a pharmaceutical composition comprising a nucleic acid construct as defined in claim 4 or 5 and preferably wherein the pharmaceutical composition is administered to a tumor cell of a cancer patient to be treated.

9. A method for identification of a substance capable of preventing, delaying and/or treating metastasis in a cancer patient, the method comprising the steps of:
(a) providing a test cell population capable of expressing a nucleotide sequence as present in a nucleic acid construct, wherein said nucleotide sequence is a nucleotide sequence that has at least 60% identity with a sequence selected from SEQ ID NO: 1-32 as identified in claim 1 or SEQ ID NO:1-169; and,
a nucleotide sequence that encodes an amino acid sequence that has at least 60% amino acid identity with an amino acid sequence encoded by a nucleotide sequence selected from SEQ ID NO; 1-32 or SEQ ID NO:1-169;
(b) contacting the test cell population with the substance;
(c) determining the expression level of the nucleotide sequence or the activity or steady state level of the polypeptide in the test cell population contacted with the substance;
(d) comparing the expression, activity or steady state level determined in (c) with the expression, activity or steady state level of the nucleotide sequence or of the polypeptide in a test cell population that is not contacted with the substance; and,
(e) identifying a substance that produces a difference in expression level, activity or steady state level of the nucleotide sequence or the polypeptide, between the test cell population that is contacted with the substance and the test cell population that is not contacted with the substance.

10. An ex vivo method of prognosticating metastasis in a cancer patient, preferably a breast cancer patient, comprising identifying differential modulation of a gene (relative to the expression of a same gene in a control) in a combination of genes selected from the groups consisting of genes represented by the following sequences SEQ ID NO:1-32 as identified in claim 1 or SEQ ID NO:1-169 and optionally using this result to decide about the treatment to be given to the patient.

11. An ex vivo method of prognosticating the absence of metastasis in a cancer patient, preferably a breast cancer patient, comprising identifying a lack of differential modulation of a gene (relative to the expression of a same gene in a control population) in a combination of genes selected from the groups consisting of genes represented by the following sequences SEQ ID NO:1-32 as identified in claim 1 or SEQ ID NO:1-169 and optionally using this result to decide about the treatment to be given to the patient.

12. A method according to claim 11, wherein said prognosis of the absence of metastasis is for a five year period.

13. A diagnostic portfolio comprising or consisting of isolated nucleic acid sequences, their complement or portions thereof, of a combination of genes selected from the groups consisting of genes represented by the following sequences SEQ ID NO:1-32 or SEQ ID NO:1-169.

14. A kit for prognosticating metastasis in a cancer patient comprising reagents for detecting nucleic acid sequences, their complements or portions thereof in a combination of genes selected from the groups consisting of genes represented by the following sequences SEQ ID NO:1-32 or SEQ ID NO:1-169, and optionally further comprising instructions.

15. A kit according to claim 14 further comprising reagents for conducting a microarray analysis and optionally further comprising a medium through which said nucleic acid sequences or their complements are assayed, preferably wherein said medium is a microarray
